United States Patent Application Publication US 2025/0295137 A1 - sequence listing, part 17

SEQ ID NO: 17 - DNA, 1915429 bp, Latilactobacillus fuchuensis
  source 1..1915429: mol_type = genomic DNA
tttttaggttaatcctcaaagcctaaccaacttgagttagcactctagtcaaaactgcatgggctcacaggttcctacgcctagctacaaatagcgaatcatgactaaaaaccagtcataattcgctattttaggctaatgctcagaacctaccgcgaggcccaagcactctagtcgaaacgtgcttttggttgcaacaacttccgcttaatctaaaataaccgataatctcaagaccaagattaccggttatttataattaatgctcagttgctcccgcaaccaaaagcactcttattttaaacgcgcttccaagccaacttcttccgtctagctacaaataaaaacgtgtatgactaaagtaccagtcatacacgtttctattttaggctatactcagaagttaaccggcttggtcagcactctgttatttgcttaataagcttgctgctgcttcgtctacgatgattgtaacgtcatcgtgtaattgaagggcacttgctggtacgtccgttgtttgtgggccttcaactgtgcctttgatggcttcagctttagattcgccgtaagcgaataggacaattttcttagcttttaagattgagccaatgcccattgagattgctttagtcggtacgtcagcttcgttttcgaagaaacgtgcgttagctttaatcgttgattctgttaattgaacttcttgtgtgttgctatcaaatgatgagccgggttcgttaaaaccaatatgcccattttgaccaatccccaaaatttggatatcaactgggttatcagcaatcacttgatcataacgttttagttcggcaggaatatcacttgcaagaccattgggtacgtatgatttagcaaatggtttcttattaaataagttttctttcatgaaataatgataactttgatcattttcagctggcaagccaacatattcatctaagttaactgacgtacattctgtgaaatctaaatcgctagcaaccactttttggtaaaaagcaattggtgaactccctgttgctaaaccgaaaactttggcatcgttagccaaaccttctttaaaaatttcaaagcctttttgagcgccttcaacttgatcttttactttaataattttcatcattatattctccctttgtccagaattcaaagaaccattggtatagtccaattataaacgcccctattttaaaatgcaagcttttttacactaaaaagcagcggataaattggtatacctgggagttagcgttttctcaatcatccccgaattttggcaactgatggccagccaaatttttcatttatcttacaaattgaaaatcgggtatgataatgtgatgaactattatataatattggacagtatgagaaaaaggtggcgtattatttgaaagagccaaagcagcgttctgaccaatggcagcaacgagcacgcaagtttctcgaagcaagccgcactaaagtcaatcacttcagccagaaggctaaagctaaattacagcgaatttttcatgtaccgtctaacccaagtcgcagtcaacaaactaaagcgcaaaaaagggactacattcaatcacttagccaatccagttggttatttaagattaatgtcggtctggcggccattaaaagtatcatcctttatggaatctcaatcggtttaattctgtttgccttagtggccgggattggttctggttacttcgcagcattgatgaaatctgaaacgattcccagttatcaagtcttgaaacaacaactcgataacacggatcaggcggccggtctatatttcgatcaaaacgttaaatttgggtcgattaaaaccgatttagttcggacacccgttaaaattgatcagatgtccccttatttaactgatgcgattgttgcaaccgaagatgaggacttctatcaacattccggagttgtgcctaaagcgctcttacgtgcggtcatttccgaagtcactggttttggttcacaaaccggtgggtcgacactaacccaacaattgattaagatgcaaatcttaacctcacaggtgactttcaaacgaaaagcaaccgaagtcctccttgcgttacgcgtggacaaatatttcactaaaaaagaaattttacaagactatttaaacgtcgccactttaggccgcaacaataaaggccaaaacattgctggggttcaagaggcagccttaggcttattcggtaaaaatgctaaagacttatcgttagcagaagcagcctttatcgccggcttaccccaaagtccttcagtttacaccccttacgatcaagatggcactttaaaagatcctgaatatttaaagtacggactagaccggaaagacactgttttattccggatgtatcgtgatcaccgaattaccaacgccgaatacaaagccgctaaaaaagtggatttgacctcggagtttcaagcaaaaacggaacccgaatcaacttcgaagcgttacggctacgtctataatttacttgaatcacaagccactgatattatgacgaaacaattagccaaagaagctaatatttcaacgcagaaactgaacagtgacaatacgttataccaacaatatcaaacacaagcaacggaactattaagcacgaagggttatcaaatccatagtacaatcaacaaagatatttacgattcaatgcaaaatactgttaaagaacaaagtagcacttttggttacacctataccgacaccgaaaccgacgccgtgactggtttacaacaacaagtctcctcccccgttcaaaatgggagtgtcttgttagacaaccaaactggtaaggtcatctcatttgtcggtggtcgtgatttctcattgaaacaaaccaattacatgttaacgaagcgctcccccggatcaaccatcaaaccattattggtttatggtcccgcaattgatcaaaaattgattggttctaaaaccatgcttgccgattttaaaaccaactttaaaacttacgcgccgaccgattacggtggcacgattcagaacaaattcatctcggctgacacggcactagcccaatcgctcaatattccgaccgttaacttgtacaacgaacttcgtaaaacaagcgatccgtctaaatatatgagtaagatggggcttaacctgcccgccaccgactataaccaactcggtcttgcccttggtgggacgagtgacggggtcagcgtcttagaccaagccagcgccttttcaacgtttgctgaccaaggtcaacacgttgatgcttacgtcattgataaaattaccgatcccgctggtaacgttgtttatcaacataagtctcagaaaacaaaagtcttttcaaaggcgacttcctatattatgaaccaaatgttatccggcgtattgactgacgggacagcctcaacgttgtctgatcagctctacttcaacacgaataacctggttggtaaaaccgggacttctaatgataaccgtgatatctggttcatcgggagcacccccggaattaccctcgcttcttggatgggctacgacagtactggtcggaatttaaccgatagtgccagcagtatcaacgaacaatattgggctaaattagccaatagcgtttatcaactcgatccagattcaatgaagctcgaagctgaccggacaaaacctagcacagtgatttcaagtaaggtgcttaaactcaccgggcaattacctggctcagtttcactcaatggtaataccaaagcgctagatggcaccacgacaacttcgctttataataattggacaccaccggctacaacgtatgagttcgggattggtggttcaactaagaattacgaaacgttctggaatcattatttaggctataacaacggctacggttcaattacttatagtacagcggatgaactcgatccaacggcggataataagacaaccactagcacgaacaattcaacttccgattaatcaaaaaagagcctcctcacaaccaatattggttgtgaggaggctctttttaagtcgcttaatgtttcgttgattgacgatcgacaatgctgtatggcaatagaatcgtcttatcagtaatttcttctttgttcatcatctttgttagaagacgcatcgctacggcccccatatcgtacaagggttgtgaaattgacgtcatttggggacgaagcatttcagttaatttcgtattgttacttgtaattaattcgaaatcagctgggatttggacacccgcatcaacagcaccgtcaagcacaccaacggctaattcgtcatcactaacgaccgccgcagttgcgccagcagcttgcactttagcaaataatgcttcgccagcattgtagctgtattccgtttcgaagattaaactttcgtcataggcaatcccagcttcgttcaaggcttctttatagccgtgtaaacgatatttactgttgattgggaattggaggttaccacaaatgaaggcgaccttcttgttgccattattgattaatttcaacgttgcatccttaacagcatcaacgtaatcaatattcacactaccaacttgttcgtctggatcgattgaaccagcaagcacgattggtgttttagaacgtgagaattcagcccggatttcatctgaaatactgtggcccatgtaaattaaaccgtcgacttgtttcgccaatagcgtatttaacacttgtacttctttttggttgttttcgtctgagttcgctagaatgatgttgtatttgtacattgttgcgacatcgtcaatcccacgcgcaagggatgcaaaataaatatcactaacgtcgggaatgatgaccccaactgtcgttgttttcttacttgctaagccccgggcaacggcatttggtcggtaatctaaacgatcgatgacctctagcacttttttacgtgttgctggcttcacattcggattgccattgacaactcgagagacggttgccattgaaacgtcggcttcacgagcgacgtcgtagattgtaattgtttgtttttccatgataaatgattcctttcatttgatgaaattaaaaaatataatatattgattgttttcattattcttcttgattaacttaacaaagttttaaagcaaatgcaagcggttaacaacttttttcatgaaatttacatttttgttttcatttggagtttacattaacgtttacattaactgtgatatactaaaattatcaaatgtaaaggaagtgctttagatgaacaatcaattagctcaattacaaaattgggttgtcgaacagaacttagatgtggcttacatcagtaatccgaccgacatcctctatttcacaggttttgaaagcgaccccgccgaacgtgttttagcgttattcgtattcgctgacaaagacccattcctatttacaccacaacttgaagttgaatccgctaaaaaagcgggttggaagatggacgtctacggttatctcgaccatgaagacccatacgccatcattgccgaccaaattaaaaaacgcgtggctaatcccactcgttgggcccttgaaaaagatgacctacccgttcaacgttatgaagcaatcttaggccaattcccagatgcaaccttccctggcaatgcctcacgcttcttagaaaacttaaaattaatcaaaacacccgaagaaattgctttaatggaagcagccggccgtgaagccgattatgcttttgaagtcggctttaacgccttaaaagctggtagaacggaacaagacattgttgctgaaatcgaatatgcgatgatgcgtaaaggtgttatgcacatgagttttgataccatcgttcaatcaggcattaacgcagctaacccacatggtggtcctgaagccaacatcttaacccctgacgccctcgtcttattcgatcttgggacattgcataaaggttacatgagtgacgcttctcggactgtcgcttttggcaaaccagatgcaaaatcattggaaatccataaggtttgtcttgaagccaacttaaccgcccaagcagcgattaaacccggcgtcacagcagctcaattggataaaattgcccgtgacgtgattgccaaagccggctacggcgaatacttcattcaccgtttaggccacgggattgggacttcagaacatgaattcccatcaatcatggaaggcaacgacatgttgatcaaacctggcatgtgcttctcagttgaacctggtatctacatcccaggcgtcgctggcgtccggattgaagactgcatccacgtcacagaaacaggctcagaatcattcacccacatgacaaaagaactacaaacattctaagagtgctgacttgagcgcttagactttgagcataacctaaaaatatcccggatggttgctttttaaccatctgggatattttgtagttaggcggaaaggtctgctcaagaagcacgtttaaattaagagtgcttttggttgcgggagcaactgagcattaattataaataaccggtaatcttgcactttaagattattggttattttagattaagcggaagttggtgcaaacaaaagcacgttttgactagagtgcttgggcctcacggtaggttctgagcattagcctaaaatagcgaattatgactgatttttagtcatgattcgctatttttttaggctagacagcaaaaaaagccgaatcaaaatttgattcggctttttaacatatcgcttatttatctgttggttcaactgtttcggttgcttcagctggttgagttgcttcttctgccactgtttcagcagtttccactaaatcatctttggcttgaccaaaagcactcttaccgtcaatcacgatatcatcaaaatcatctttagcagggtctaagctactaccaaattgtgattttaaatcagccgttttttcatcgaaatgcgctttggcttgttctttaatgtcgatggcattatcttgccagtcatttgcatagtcttgcgcgcgattaacgtgaaccttggccccgttttttaaatcttcggcagtctcgctcattaaataatagtaatcttgggcacggtcggctaagtcgtcacctaaatcggctaacttagcttgtaattccttgccagtcttgggcgttaacaataatgttgcaccaatggctgctgcgccacctactaaaacacctaatagaaaatgtcctttttttgccataattatgactccttatccgttgtttgttttttattttgataaaactttaacgcgctcgcactaattttagaagccattgttgctttagcagcggtcttgcccacgctagagaccttcgtggttaaattccgactagccgcgtttaaatctgcgacactttcacctaaatcaccggccgccttaaaaacaggatctaagttggctactttaccattcacatcatctaacaatacattggctttgtttaataagccttcaacttcttttgctaatatatccacgtcttcagtaatcactgtgacacttttattggcttctgccacagtttgcgttacctgcgtcaggacctttgtgatttttaataacatcacaatgagaaaaacaactaaaactgcaaaagcccctgctgcgattaacgcagcaatttgaccacccgtcattgatttgttcctcctatttttgtcatctattatctcggttctcaatctatagaatagcattaattaaaacaaccttcaattatccgctttatttttggtgtcattttttcaaacatttgctaaactaggactatgtccaaaaaaggagtctgcacaaaatgcccatctatttattaactgcgacaccggtagccgctgttcaacggcaatcgaatattctgattcgctacatgaccagtatcgattgggatcatctgttaagcacttttgtcaccgggcttttacaaattatcttcttatcgattttattttatctaattaatcggattggtaaatttgcgattcgccggacttttcgtaaataccgccaatccgataatttggccagtaaccggatgaacaccattttcacgttgacgattaacgcgtttgcctacctgctgattttcttttatctgtatgcactactcagcgttcttggcgttcccgttggtacattaattgccggggccgggattttcagcttggcaattggcttaggcgcccaaggctttgtcaacgacatcgtgaccggcttcttcatcttagctgaacaacaattcgatgtcggtgatatcgtcaaaatcggtttagtcgaaggcaccgtgactgcgattggcttgcgaacgacgcaagtccaaagtttagacggtaccttgaatttcatccccaaccgtaacatttcgattgttagtaacttatcccgttacaacatgcgcgtgttaatcgaaattcgaattacccctgaaactgatttacaacaactcgttgaggtgatgcacacagtcaacgagcgtttagtccccgaacatcccgaaatcaaagatggccccaccaatctaggcgtcaccactttaaaaaacgggctcttaacctatcaagtggtcatgcacaccctcaacggatcgcaaacaacgattcaacgtctctttttacaagcgtaccttgaagctttgcaagcagccggtgttactttgcctgctagtccgctaacactaacgaactaacactcaaaaaaaggagcaacacttatgcccatcattaatctaattaaaggcgcgctaatcggcgtcgccctcgtcattcctggtttatctggtagtatcttcgccgtgatcgtcggtctctatgaaccattactagccgccattgcccaattcaaaaaggattggcgcaaggcgatcatcttcttaggcccaatcggcatcggtgccggcatcgggattttattatcgaccaagattgttttatggttatgcaccgcttatccactggccgcttatagtttctttatcggtctcgtgattggcagcctaccgtttatctggcgtaaaattcacggcttcaatttttcaaaagttgcgattctaatcggtgcggcactgatcatgttactactgactaaaatcggtggtcatcaaagtgaatccgacatcgcgattcgtcaattaagttcactcgccgattttggcaccttactcttcgccggtttcttctccgtttcgttaatgctgattcccggcatttcaggttctatcatgttgatgattattaaacaatacgggaccgtttaccacgcggtcagtcaattgctcgatctactggtgtacctcgtgaccggacgatgggcgcaagcacaacaagccggtcaaagtgtcttgttattgttaccattcatgattggggccttaatcgggaccatcatcgtcgctaagctcatgcactacttattagcgcattatgcggaacacgtttatgcaggcgtcttaggcgtcgtattagcggccatctggattctcgctgaaactggtgtcgcacctgcatggcccatcggcttaacaatattgtcactcatcggaatcattttgttaatcttagtaatgattatcgtaggcgccattgccacactctacttcgacagagcataaaaaatcagagtgcgttgagttgcgatcagcaactgagcattaatgataaataacagccccaaagaccaattcgttcataacggattggtcttttttgatgcccttaactagtattttcaataacattacaaaagctttacgcaaattacccacggtttttacaatgctattgcatactagaaattgttcgatgagactgacttaaaaggagatcattcaatgtcacagattaaatgcgtcatattcgattgggctggaacgactgtcgatttcggtagcctagatcccgtcatggctttccaagcagcgtttgaaaaagcgggtatcccggttagtagtgccgcgattcgccaagatatggggattgaaaaacacgaacacatcgcgcaactctgccaacaaccagccatccaaaccgcttggcaaacacgttaccaccgtttgccgacaattgaggatcaacaaaccctcttcaacgatttcgaaacggctttattgaaacgcctctcagaacaaacgcaattaaccccctttgttttagaaacgcaggctaatttacgccaacaacacattcaaattgcgacgaccaccggttacacacggccaatgttaaccttagtcgcacaacaagcggctaaattaggttaccaaccagacttaatgtgctctaaagaagatgtcgcacaaggccggcctagtcccgccatgatcaaccacattcggcaaaccttgcaactgcccgattcgcaagcagtcattaaagtcggcgataccgtcgttgacatgcttgaaggtcaaaatgccggtgtcattacggtcggcgtactcgaaagtagtagtttagttggcctttcggtagacgaattagcggccttatcccctgaccaacgaaccgccttactcgaccaagccaaacaaaccttattggctaacggcgcagacgctgtgattctcaatcttagcgaactagcaccactgattgccagctaccaaaacacagccgttcaggagggccaataaaatgccacaaccttacttactattaacgcccggaccactgagcacctccgacaccgtcaaagccgccatgcaagtcgatctcagcacttgggatagcgattatctggcgattaccgaacggattcgcagccaactcttaaccttagccggtgtgagtgcgcccgattactcagccgttttattgcaaggtagtggcagttacggcgtcgaagccgtcctgaataccatcttacccaaacaatcaaaagacgcctgcctgatggtcgctagcaacggcgcttacggtgctcgcattgcggagatggccgatcgactccaaattaaccacgtcgatttaatcgtccctgaaacaaaacccgtcaccgcggcattagtcaccgcctttttagaccaacaccccgaggtcacccattttgcaatgattcattgtgagacgacgaccggcattttaaatccgattgaaacgattctacctcaagtgaaagaccgtgggattatcacgattgtcgatgcaatgagtagtttcggcggcatccccatcaacttacttgatttaaaaattgattttctaatcagtagcgccaataaatgtattcaaggggttcccggattcgccttcgtgatggccaattgtgcgattctcgaaacttgccaaggtcggtcgacctctctatcgctcgacctttatgaccaacacatgagtttcaaaatgcatcccggtaaatggcgattcacttccccaacccataccgtcttggcgttcgatcaagccttaagtgaactaatcgctgaaggtggcgtggcgcaacgttaccaacgttacactgccaatcaacgtcaactggtcaatggtatgcaagcccttggttaccaagcgttgttgccgactgcggtgcaatcaccgattattaccacgtttaaaaccccgaatcccgattttgatttcaaccgtttctaccaagcattaaaagaccgacagttcgtgatttatcccggtaaaacaaccgctgcaccgtcttttcggatcggcacgattggcgtcgtcgatcaacctgaaatttcagcattattagccgcaattgaaagcacccaaaaattaacccactaaggagttcctctcgtgaaaaagaaaacaattctaaccagcctattttgtctattggcgctttcagccgttttaatcggttgtgccaagaaaaacgaccaatcgacgagtcaaaaaacgttaaccatggttttctatccgaacgaatccgctaagaatttcaacgcctcacgggccgaaattcaacaccaaatcgaaaaagcaaccggcaaaaaagtcaaaattcaaacgacgaccgattataacgtcgccatcgaagcgattacttctggcaaagcccaactcgcttttatgggacctgaaggctatgtccaagctaataaccgcaacaaggccgttcaacccttagtcgccctctctggcgcatctggcacgctcaaagatgctagttaccgttcgtatttcatggtacccaaagacaaggccgctgattatcaaaaggacggccagtattcaattgataatattaaaggcaaaaaagatttcgtttgtctccgtcagctccacatcaggttacatgattccggtcgcgaccatcaaacaacaattcaaactcaaatcgaccgatgaattatcgcaaagcggccatttcttcaaatccgttttattcggtaattcgcaccaaggttcggccgtcaacctctttaaaggcgatgccgatgtcgccgtattcgatgatatcgatacgagtgcttacatcgatgtcgaacaaggcagctggtctaaagtcggttcaaccttcaaggtcaaagccaacgccacagcaccgttcaccgatgttcgcggtcttgaaagtgtttcgattgccgttaatcccgtccaaaatgggccctttgtcgctaacacgaaagccttgagtgctgccgatcaaaagaagattacagccgcctttaccagcaaagaaatgacggcgaatacgaagattctatcgccagttaacgctaaagtccccgctatctggaaaaaagaatcgactaaaaccaaattattgaaagtcactgatgactggtacaaaccaacgcaccaactcgttcaagataactaaatttgaaaggcggtccattatgctatccgttaaacatctcaataaaacttttgcgacgggccaacaagccctaaccgacgtttcttttgacgcccaagctggcgaattcctagtgattatcgggccatctggtgccggtaaatccaccattctcagaagtatcaaccaattaatcaccgatgattctggtgaaatcaccctggccgaccaagatattcgccacgcttctaaatcacaattacgtcatattcgccgacagattgggatgatttttcaaaatgctaatttagtgggccatctaaccgtcctcgaaaacgtcttacacggtcgtctagggtatcaatccaccctagcctgaattctcggccgttacacgaccgctgaaaaagaaaccgccgttgatttgttaacccaagtcggtttagccgattttatgtatcaccgttgcgatgaactcagtggcggtcaaatgcaacgagtcgggattgcccgggccttaatgcaagaccccaaaatcctcttgtgtgacgaaccgattgcttcactcgatccgaaatcagcgaaagtcgtgatggattacctccactttctcgccaaacaacgccacatcacctgcattgtcaacctgcaccaagtcgatgcggcccgcgaatacgctgatcggattttagggattaaccaaggccaagtggttttcgaaggcaccccagatcaattatccgacgatgctttggaacaactttaccaaggtaaacgggaggtccaacactcatgaccgttcaaaccttctttcaccggcgccgcagtcgttttttattcggcttgctcttctttagtgccttatactacggtgcggcaaccttagtcgattaccatctgttaaactcctttcaagcgattccagcggcctttgcttggttagccaccaactttatgccaaccacccgctcaatggccttcttacctttgattctgaccaaactcggacaaaccatcatcttatcaatcaccgcgaccgtcattgcggcgattctcgcgctggcgttagcgattatcggttcgagcaccaccggtctgaatcgcgcaaccaaattgttagcgcgggtcatcgcgtcgatttgtcgcaatattccattggtcgcttgggcgatgatcttattgctctcgtttaaacaaagtgacttcaccggttttttagccctcttcttcggttcatttggttatctgacccgttcgttcatggaactgattgaatccgatgccaccgcgatttacgaagcactcagtacgaccggcgctagttatttacaagtcgtcttacgcgggattatccccagtatttcagcgtcattactcagctggttgttatatatgattgaaaataacatccgcgatgcgaccttagttgggattctaaccgggactgggattggtttcttattcgatctgtattacaaaagtttccggttcgacttagccggcatgaccaccgtaacgattattgtcgccgtcgtttgtctcgaattattagccaatcaaattaggaggttaatccgatgattgaaccgatcactgatctgaccaataccgccaaaaagcccccgattcgcgtccatctatggaatcgtcgtcagaaaacgatgaccgctacttttgcagtcctcggcctgataaccgtctatcaattagccacgatttcatccgccaacatccatttctggccggcgactatcgcctttttcaaaaacgcgcaattgatttttctccaaccgggcttatcgggaactgatagctttggttcactgttgagtgcactcgccaccagtgccgctttagcgacgttaaccacgctattaggcgcgattgtttccttctttatcgccctcttcgccgcgagcaacctcgcaaatcgtaaaattggcctcctgattaaaacggtgatggcgatgattcgcgccattccaaccattctgtgggtgctcattttttccattgtaattgggcttggcgcagacgccgctgtgattggcttgagctttcacagtatcgcctatttaacgaaagcctacgctgaaagttttgaagatctcaacccagaagccatcgaagccttgaaggcgaccggtgccaactggtggcaaatcgtcttccaagcggtcttaccgagcagcttgccgatgttgttgtcttggaccttcattcgtttcgagattaactttaccaacgcgattgcagtcggcgcagcagccggtgccggtgggattggttaccaactcttcacggccagcagcttctacttcgacttccacgaaatcggcgtcatcatctacctttgtttagcagtcaccgcctgcttagaatttatctcggtcaaactacggaaacgttacttgaagtgagcgctgactgggaaacacattatctaacatgccataaaaaaaggttcgggataaccaccttattcaacttgatactcaattgataaccgagttctgtcacagctagttactaaatttaatgtttgattgtaatatggttgatgacaactggttcaaccggtttgtcttgcatccctgtttcagtcgcattaatttcattgacgattgccatgccactcattacttgaccaaaaacggtatgtttaaagtctaaccaaggtgtaccacccttttgataagccgtgatgacttcttcaggataaccagcacccgatagttgtgacaacatattttggttgatatgttcattagtcacgatgaagaattgactaccattcgtgttaggaccggcattagccattgataatgcaccgtttaaattgaatacttctggattaaattcatcagcaaacgcttgaccccagagactttcgccgcccatcccggtaccggttggatcgccaccttgaatcatgaaatcattgatgacccggtgaaaaacaatgccgtcgtaataatctttttcagctaaaccgataaagttttcaacggttttaggcgcttgttctgggaataatgcgactgtaaattcaccgtggttagtatcaaaagttgctgttggacctgcaaagttttctaaatctaattgtggatatgccatgtaatctacctccaagtttttaattcaatttatatcatagcgaattgtgtcttaaattactattaatatttattgcttttattgtgctttcctaatttctttttagtatactagcttaggaagtctactatataagagtaaggaagtaatgaaatgctcgattcaaaccatttatttgatatcaccatcatcggtggcggccctgtcggaatctttgccgcttactacgccggcatgcgtaaagccgatgtccaaattattgaaagcctcccagaattggggggccaagtcgcaacgctgtatccagaaaaacaaattttcgacgttgccggctttagcggtatcactggtgaccaactgaccgctaatttaatcgagcaattaagcttgtttgaacccacgattcaattatcaaccgccgttaaaaatatccagccccaaactgatgggacttttattcttgaaaccactaatggcacaacacatacgcgtggtgtgatcgttgcaatcggtaacggtgcctttactccccgtaaactggcagtcgactataaccctgattgggataatcattatgtccactatttcgccaaacagatggaccaattcaaagaccaagtcgtcgccgttgctggtggtggtgattccgcgattgaatgggccttaatgcttgaaaaagtcgcgaagcaagtctatttagtccatcggcgcgatcaatttcgcggtttagaaagtagtgtcgacgccctcaaagcctcatcaattaagattaaaaccccatttttaattgatgctttaaccgagaccgaccaacaattaacattaaatcttaaaaagatgaaatcaactgaccaagaaaccttgaccgttgataagttgctcgtcaactacggcttcatctccgacactaaaattctacgtgattggaacttaactttggaccaccatcaagtcagtgttaatcaacagatggcgactaatatcccgaacatctatgcgattggggacattgccacttatcccggtaaagttaaactaatcgccagcggttttggtgaagccccgattgcagtcaccgaattattaaccagtctgttccctgaaaagcgtcaaccgttgcacagtacgtcaattatgtaatttaaagtgattgtagcatcggtcttggtattacattcttctttgggcgcgcgccaaaactcatcaatttcagttcaaatttaaaaatgcggtctatccttaattcgagatagaccgcatttttaaattgatactcaattgataaccgagatctgtcatggcttttttatgaattaactttacgtttacttaattggctcttaacggccgtaacgaccatcggaatcaatgatactgcgataatcccgagcacgactaatgagaaatgttctttaacgactgcgatattaccaaagaagtaacccgcgccgcaacatagaactacccagagcacactcccaatcacgtcgtagcggaagaaccgtttaaacggcatttgactcccaccagccacaaacgggacaaacgttctgataatcggcataaaccgaccaatcgtaatcgtcttaccaccgtatttgtcgaagaagacctgggcctctccaattttttcggtgttgataaatttaccaaagaaccgatttttcgtagcagccagccctaatcgttggccgatttgttcatttaatgaatccccggcaatcgccgcaatcaagaataacgcggcaaacaaccaaatattcaaatcattatcggtccgcgccgccaatgctgctgcggcaaataataacgaatcgcccggtagaaacggtaaaatgaccgccccggtttcaatgaagataatggcaaacaaaatgacatacgtccaattgccaaattggttgacgatattgaccagatgcgcatcaatatgtaaaacaaaatcaattaactgcgtcatgttgacactcctatactctttttcatttaacactaacttctctagcataccgaatcggtcagccaaagcaatcttttttaggttttcttaataaaaatgttggattaacgcaacgcccttttgccccgccataataaccagccaaagctaccttcaatcaggataaaaaacagcccaaaacagatggcaaaatagctcgcgggtaacacgaggatgattggatcgaccgccggatcaaactgccaatccaaattacgaaacaacaattgatgaaagacgataaaaaagcgttcaaaattcatactcgcaataaagccgaagacgattggcaacaccaacgccatttgcatcggtgcgatgtattgccataattttgcttgttctcggcgctggcgccattgccaaatcgccggcccaaacgttatgagacaaacaacttccgccaataaaaagagccgtttcacctcaacaaaatgttggtacccgttggttgacatcggaaaatcaggcaagcgtaactggccacctggtaataataaataacgcattaattgattaaaattcttgagtaattgcggttggctaagttgttgattggccgctaaatgaccactactgctgactaacggataaatcagccaactcaataaacacgtcaagacgactgccccgctcagtagcgctaaccacgtcacgagccaaccgctcaacgaaacaacacgccgttttaagcttgccattcagctagactattaataatatgcgtcggttgggctgcttctttagccacgtcggctggtgttgaaacccccgtgtaaaccaataaagtggccatccctgaattaatgccggctttaatatccgtattatagttatctccgaccatcacgacttgttctttcgtcaaaccgaactgttctaacgccatatccataataatcgtttcgggtttaccaatatacaaggctgaacgttgtgtcgaacgttccactaaggcaatcactgaacccgcgcctggtactaaaccgcgttcgttcggtaaattagtatcggcattggtcccgatgaaaagcgccccacgtttaatcgctaacgtcgctaattcaaacttatgataggtcacgtcatagtctagtccaacaatcacgtagtcaggatcgtattcattggttctaaaaccagcatctaaaatggcttgtttcaaaccaatttcgccaatcacatacgccgttttaccgttagcttgaccgccgtttaaatttaataaatagcgggccgtcgctaacgatggtgtataaacttggtcagcggtagcgtgaatatcgtggttatccgccaaattttgaacgactgcttctggtgacttagtcgtgttattggttaagaacatgaaatctaaatgcttcgcctgcaattgttcaataaaggcctttgcttctggaatccgttctttgccgcggtacatcgtgccatctaaatcaattaagtagcctgcatatttgttatctgtcatctgctttttaacgctccaatttactttttagtgtcgctttctaatggtcgtatcttaaaatgccgcttattaacggattttttattcgtcgtgacggccttttttggttgttctttaactactttttggctgtcaaccacttggcgttccgtaaagcctggtttttgctgacgacgccgtttttgcgaattccgttgccgattattgtggcgccggttttcatttttaatgattggtttaccttggcgttcaatcacgaagtagggacaaccaaaattacaatattcatagaggtaatcttccaacgtatcaatcaattgatctttgttggcgcgccggttagtcgttttatagaagccccgcaagcgcaattgttcaaaaccccaatcagcgacgatgtaatcatatttggctaaaacatcgttgtaccgttcatttaatttttcaggctgatagccgtcgcggtaattgaccaccacttcataggcgcatttatcgatttctaacattgtttcacttttagccaccacgtgttgtgggacttctggttgtttttcagttggcgtactttctgtttccttggccaacgcttgtgtgacttttttagtcagtttaggatttggtttggtttctgtcaccttggtcctccttttcccgttgtacggggtattcttgtgctaaataacgagcaactgcatttcttaaaaaatcaggaaagacaaattcagtttcgccgacaatctcaattgtcgggaagaatgggatgaataaataatgatcgaccgttgcaaacgtgtacgtctgatcgggttgcacttcttgaccgtgccaaaagactcggcgtaaattcagatcaactgcgataccgtcataaacaacgtctccaaagattttaccacgaaaactcatccctttaatcggaaacttacgtaaaaacaaccgattcttttccatttcaagcaccattcgccataaatcgtaacctttgagtgtgactttaatcaggtgcatcggatggggtaactgcgtttggacatcatctttagtgatgacgcccgacggcaaattcgttaagaataacccggtgtttaaaatagccgcatccgtctcggtcgctgtctccaacgccttgagtccggtcatcatcatcggcgattccccgaccgctttaatcggtaagctttccggtaaatcagccactgtctgggccttcagtaatgcgtggccccgtttcagataaccttctatttcagctttatcggtctttttaactggtaaatccgccgttaaaacggtgtgggccacttcatcggtaatctgatgatcttctagtgtcaacgtaatttcgccgatgtaatggccgtacttttcagccgcagttaacaaagtctgattgaccaccaggccgtctttcaatagatggtgtgtatgcgccccacagatgacgtcgatttccggaaaatgagccgccaaccaattatccgtcgtaatgcctaaatgggacaatagaatcagcacgtcatattggccttccagagtcgctaatagcttaggcatctcttcactaatcgtgaccggttcccaaccattcggtcgatacgttaagaaaaatggtgcggttagcccgacgaccgccacccgagtcccggcttccgtcgtcataatttgatacggttgcgcaaattcggctagttgttcatcggattgttcgaataaattggccaacaagactggaaagtttgcgtggtcgtacaggtgttctaaatcagcatgactattgccaatcccttcattattcccaatcgtgacaccatcgtaaccaatctgattcaacaattcggtattgatttgaccattagtcgcctccgttaaaggatgactacgatccatcgcatccccaatatcaaacgtataaacagtctcgttttgttgacgataagtttgttgcttttctaataggaaacggcgcattctcggccagttttcaaaatgtgaatgtaaatcattcgtgtgtaaaatatgaattgtttccatttgattaccctcttagcgtttaacgccgcttaacttgccctcacgttactgaatccgttcaaaaatcaacttgatttcgaccattgattaaaacgctagccaatatggttcgcttttaaaatttcattgaacgccgtttgaatcgcgccgtcggtcttctgccattcttcccaatggtcaaaatcgacagttggcatcgtgtaagtttcgttgatgtagcgttcatacgtttgaaccgcatttgagtgtggaatattcaattgtaaaatacgaacttgtttaattaacccccgattagcggctaactcaccacgaccattcatgaaaatattggccaactcataataagtggtgccgtctaaccgtgtgatttcttcgatgatgtcaaatacctgatacttctccgccatatcgttacttcctattcttatccgtcttaatctatgtttattttaccaatatgtacacaaaaaaaccactatccgtagacagtggttggcataagagagaaagagaattgataaaaaggtaattgcataagtaccttacgaacataatataccgcttaatgtaagcgttgtcaaatatatttttaacttttttacttttctgtaaattaaatgactcatctgggctttttttcggaataatggtatcttattaggtagctttaaaatgtgaggaggttgctgatttgtttaaaaataatcagcatcgttggctattagccttttgtgccgtctgtttttcattattatccggatttaccgtgattggccatcgcggcgatcccatcaatgcaccagaagagacatttcaaagtatcgacatggctttttcgcaaggtgccaattacgtcgaactcgacttacacgaatccgaagatggcgtcttagtcatctctcatgatcgtaatttacaacgagtgaccggtgtcgatacgattgtttctcaaaatacattcgccaaactcagtacgcttaaaatgagtaacggcgaacccatccatagtgtcgaacaactctttcaacactatcaaaacaatccgaacgctaaattcttaatcgaaacgaagaaaactaaaaaaggcaatccacaagatatggaagctaaattagtcgcgctgattcaaaaataccagatgcaagatcgaattatggtccattcattttcgattaagagtctgatgaatatgcagaaattaatgccccagattccgcggatttttatcgtcggtagtcttcaacgcatttcgttcgaaagctttaagtacgctgacggcatcaatatttcgtccgagttggttaccccaacgattattaagcaactccattatctccatcaaaaagtctatgtttggaacgagatggctgaaaatcaaacgacttggaactggctagttaatttaaacgtcgatggggtcgtcacgaattatcccgcactcgggcggcattaccaagccgcccaggatcaagccgatattaaaaatctcgatacaacgggtcaagtcaatagtttaacgaatctcccaaccatcgaaaacccttacgaattaacgactgccaaaaccccggctaaagcgggtcacacctatcaaatcacccaaaccattacaattgacgatcaaacttactatcgaattggtaccaatcgtttcgttttaagtgatacaattaacgttggtcaaactgctcaagcagcagcgctcttagtgggtaaatcaattcaagttaaaaaccaaccgttaagcattccaacttggaatagcccgattcatcccacccaaatgaccggtcatttaatcgccaacagtcaccatcaaattctggcagtccgctacgtcggcaaccgtgtttggtttaaggttaaaggcggctgggttaagagccaacaaactcaaattaatttagcgcccagtaccgatcaaagccaacttgtttggcatttctaccgtcaactgcccgcacaattacggcaaacaaacttaaccatcctgccgacacccctgacctttttaaacccggttaaagcaagtccgccccccaaaccgttgcttcaatttgcaaccgcttggtcgaatcctactattaaatcctaacggaggctctcactatgacaattgatcacgaccaactaattcgctccgtccaaaagacacttcctaaagaagaaacgttggatcacatctcaactcttttcaaaatacttggcgataaaacccgtgcgaaaattctctacgcactatttcaatcagaattacgggtctacgatatcgtcaacgtattagagatgtcgcaatcctctatttctcatcaattacgcgtcttaaaacaagcaaaattggttaaaagtcgcaaagaaggcaaagaagtctactattctctagcggataatcacgtgatcaatattttctcacaagtcatcgcccacgttaatgaacattaaacgccaaaaagcacccagcgcaagtctctcaaaggcttacgctgggtgcttttcttttggtaacgatcatcgttaaaattaatcggcattagccttgcattctaagccttttggtgttatcttttaggtaacgtatgaatatacgctcatatgtccacttaaaacattcacccaatttaacggttgttttaaaccaataaggaggtttctattatgaaacaagttcaattaacgggcatcgattgcgcagcctgtgccattaaaatcgaaagtaccgtcaagcgattgcctaacgttaaaagttgttcagtcaacttcgccacccagaaattaaattatgaattaaccggtaaccaagcagcaacggtttttgaaaccgagctagcggacttactcaaaaaaacagaacccgacgtgatggtccaatcaactaatcaacccgaaccaacctctcaaaaatggtcgtttaatgtcaatttaatccggataatcgctagtgcactgcttcttggcctttcatatctgccagcagtccacacaactggtcaagttttattactactaagcgcctttttaatcatcggctacgacattatctggaaagctgtttttaatattttccatggtcaatggttcgatgaaaactttttaatgtcagttgcaaccatcggggccttcgggattggtcaatacgctgaagcagtcggcgtcatgctcttttatcaagttggtgaatatttccaaacgttggcgattaaccattcgcgccaatcaatcgctagcttggtcgccatcaaaccggcctttgccaatcaaaaaacgaccaccggtctgcaacgcgtcgccccagaatccgttcaggttggggagacaatcgtggtcaaacccggtgaaaaagtgcccctagacgggattgtcatcgacggcactagcttcgtcaatacggccgcgattaccggtgaatcagtgccgcgcgctttcaaatccggcgacaccatcttaagtggtggcattaatcagtctggtttactcagtatcgaggtcactaaaccttacgcggattcaaccgtcgctaaaatcttagatctcgttgaaaatgctagcagtcaaaaagcccctacggaaaacttcatcacgcggtttgctaaagtttatacgccaatcgtcgtcggtttcgcactcctattagccattgtgccacccctatttttcggcggggttttcgctgattggttataccgtgcgctcatcttcctggtcatctcgtgtccttgcgccttagtgatttcaatcccgctaggtttcttcgccgggattggcacggcttctaaaaacggaattctggtcaaaggcagtaactaccttgaagccttaaacgacgttcaaaccgtcgtctttgataaaaccggcacgttaacaaaggggacgtttacggtcaccgcaatccatccgattggcgtgactaacgatcgtttattgcatttagcagccttggtcgaacaaaattcgaaccatccgattgcccaatcaatcctaaccgctaaccagaccccactaacagaattaatcagtgcggttcgcgaaattgccgggcacggtgtccaaggtcaactcgacggccaattattacaagccggtaaagccagttggttaactaaaaatggattaacaccacttgaaccaactgaaattgggacgagtatccacctcgcttacgctggacaatatctaggttacttagtgattgccgatactctcaaacctgatgcccaagcagcaattcaacaattaaaaacggctggcattcgccaaaccattatgttgaccggcgacaaccaagccgtcgcaagtgcggttagtcaaacactcggcattgatcgtgttgaaagcgaactcttaccacaagataaagtcgcactcgtagcagcgctcaccgacgaccgcgccaccaacggcaaaattgccttcgttggcgatgggattaacgacacacccgtcttggcacgcgccgatgttggggtcgcaatgggcggtttaggctcagacgcagcaattgaagcggccgatatcgttttgatgtcggatgaaccaactaaactcgccaccgcaatttcgattgcgcgttttacccgtaagattgtttggcaaaacattattttcgcactcgctgttaaaggactcttcctattattgggtgcctttgggattgcgacaatgtgggaagctgtttttgccgatgtcggtgtcactttaatcgcgattttaaacgccttacgaattatgaaaaaataagtaaaaaaagcctattaaattaggcttttttcatgcttattttcactttaaagggctgtttaaattcggtttgatatgctaagattagagtagtttcattttacattaaccaaatcttggttaaaatttaacaaagaaagctgggactccaatgacattgaattggcaacaagaagcagctaagtacaaagatcaaatgctagctgacctaactactttattaaagattgatagtgcacgcgacgttgaacacaaaactgacgacgcaccactaggccctggaccacgtgatgccttgctacaaatgcttgcaatcgcagatcgtgatggtttcaccactaagaatattgaaaatgttgctggccgtattgaagctggtcatggcgacgaaatcttcggtattttaggtcacatggatgtcgtacctgccggtgaaggctgggaaacaaacccatttgaacccgtgattaaagatggcaaaatttacgcccgcggttcttcagatgacaaaggcccttcaattgcagcttactatgcgcttaaattattaaaagacaacaatatcgaattaaataaaaccgtccatttcattattgggactgatgaagaaagcgaatgggttggtatcaaccgttatctagaagttgaaccaaaacctgatttcgcaatttcaccagacgctaacttcccaatcatcaatggcgaaaaaggaattgtgtcatacgttgcaacgttcaaaccagttgatggtgctgatggcgacatcacattaatcagtttcaaatctggcctgcgcgctaacatggtgcctcaaacagctcaagcagttgttgctgggacattacctgctgatttcgaagcacaatttaacgcttatttggcagaacacaaactccaaggttcaatcactgctgaaggtgccaatactaagattaacttaatcggtaaaggctcacatgctcaagaaccaaaagccggcgtgaatgcggctacttatctagcaactttcttagctgattttgcattcgacgcacaaggtggcaactatgttggcacaattgcccgtttaatgcacaaagattcacgtggtcacttgttgaacatcaactacactgatgatgtgatgggcgatttaaccatctgtccagcagtcttcaactacacacaagatggtgccgcaaccgttctattgaacgttcgctatccaaaaggtgtcactgatgaaagtactcgcgaaacattggcaacaaccttagctgaaattgctgacgttgtgattgacggtcacgcgcaaggtcctcattacgttgctggcaacgatccattggttgctactttacttcaagtctttgaagatcaaacgggtcttaaaggtcatgaacaagtaatcggcggcggcacatatggtcgtattcttgaacgtggggttgcctttggtgcccttcctgaagaacgcgaaaacgtgatgcatcaagctaacgaatacatgcatatcgaagatatcatgaacgcaatcgccatctatgcagatgcaatctaccgtttaacacgttaatataactttaaaaaagtaacaagctgtgacagaactcggttatcaattgagtatcaagttgaaaaagctgattatcccgaactatcaggataaccagcttttttgatttgaacggcaattgatgcgttctggcgcgcgtcaatttccgttcaaataaggatactgagactgatgtaacgcccgctttttgattaccttaaatagtggtcacgaaccgcttcaatgcccgccactaactcattaaaaggccgttcaaccaatcccggtattggttgttgatctgaatatagactataaaccgtggttaccggtcgttttaagcattgcccaacctgtcgctcgattggtgacaattgtggtttcgcagaatcatgttccagtgctaaatcaatattagggacgccatcgactaatattttcttccgcttcgcacaatggaccgtcaaatgcgtccccgctaatgccgtctttagtgcggcgaagattgccgattcaaaagcatttgaattcacttgtcttacttcagagtctcgctgtgcaacggcttcagagaacgcacgacgccctaacggcttcccataacggtctaaaaatttagccgtacaaacataataaattcctcgtctgccaattggcgtcgtattatgaaataacgtcgttggcaccgtctgcaaatcgctaagcgttttaatgggtaacacttcagattgaataaaccgatcataccggtacgtactgtacatcattggcagatccgccggttgattttctaaataggctttttcaagtaaagcaacgtcgatttggtgaatgaggccaaataaaatggcgcctaaattctcaatggtcacatcgaagcaaatcagattgccttctgcattcttaatttcaaaataataacaattatcatcaactgattcttccgctttgatttgagtcagaatcggcgcctgaaattcaggtgtcgtgtaactaaattgatggtcggtaatggccactggttcaaatgcagtaatcggttcaaaactaaggtcctttttcaccaacgaacgatccacataatattttaaaatctccggttgtttaacctcataagaatctttgtaacacaaccaataagcagctatcgaaaatccgagttgcgaagcttgttgaatcaacttaaaaagtccttctaaaaaacggggaccttcatcaattggggtcaagtcttcaagcgttaactgccgcaacgcctcttgcgtaacgtcatctgtccatcggcaaccgtcaatatcgtatatttcataacgcgcttgttgcgctataaaatcggtcgaccaactggggatttcggtcgtggcattgatcatggctgttgccgtatagtaatactgaatttggttagcatataacgctaactgatcaagtctcgcctgcattggcgtgatttctggtgattgcgccaacatttcaggaaattgttctttcatttctgctcggattgattctgtatatttaatcccattttgtaacaataaacgattaaattcacgttcattaaaataatgttgcgtactttcctggttcattagtaattgccgaacaatttcgcgataatttttgggaataaacacctgaccagctccttctttttgaatggttcacgttaactttagtatagaaaataaccgtgacaccattcgtcgtttcaatcgttatttaaaaaataacctaagattaatcacccagtcactgcccaacagtcattctggaattctaatcttaggttatttgattggtcttaatgcttgggtgcgtcgaccaatttaaaggtcgactgcccatctttaacgattgcgtacaaaatttgccgttgggtatcatcgaaataacccaaattaacggcggtctccccgtcgatttcttcgattccttcaaaatggtcccgcacaacggatttcaccaattccatattcgtcatatgtttttggattttttggaccgcgaccgccaacgtatacccttcatccaaaaaatgtttgattaaaatcgctttaatcgttgtgtgcgcatcgtattcacgcgccttttgattagccgtttcgcgtgattgtaaataacccttttgttcccaatagcgcaattgacggggcgtcaccttcgccatcttgcaaacttcgctaatcccaaatatcaattgttcggtacttattaatttgagaaagaaatccttttgcacatcaccagctccgttcttacttctaaacacattatatgaaactggttacttttgtcaagtcaaatgacactcttgtcagcttacttgacaatgttttctgaaaagtctaaactttaaaatcgaatcattaaacgtaaaggagatttttatcttggctcattcgcaaccattagacatccacggtaaaccgtataaccggaccgtcctagtcttagtcttattgattgggactttctgtacagttcttaatcaaactattttatccaccgcttttcccactttaatgaaagctttcgatgtttcgacgtcttccgttcagtggttaacaaccgggttcttactggtcaacgggattatgattccgatcagcgcttggttaatcaaccgtttcaattctaaaattctctacatgtcagccatgagtgtgttcttattagggaccatcatctgctacatcgcgccaacgagttcatttgcggtcctcttaatcggccgtttaatccaagctgctggtgtcgggatttcgatgccaattttgcaaacgattatgttaacgattttcccacccgaaaaacggggcactgccatggggatgtccgggattgtcatcggattagcacccgccttagggcccaccctttctggttggatcatcgattcttacaactggcgcgttttattcggcatgattattccaatcgtcatcttggtcttaatccttgctagtttccaaatgaagagtgtgatcgaattatctaaacctaagattgatatgttatcgattattctgtcgaccattggctttgggagtttactctacgggttctcagcagtcggcgataaaggttggggtgatccgctcgtcttggccactttagccatcggggttatcgtgattggcctattcatttggcgtcaattaaccatgaccaatccgttcttggaactgcgggttttcaaatcacccgtcttcacgattgcaaccatcttaagtggtgtcaccaatatggcgatggtcggcgccgaaatggtcttacctttatacatccaaaatatccggggcgaatcggctttccattccggtttaaccttgttagccggttcattaatgatggggattatgatgcccatcaccggtcgaattttcgataaatacggggataaacgtttagccatgaccgggatgttcctgttaatgaccgcaactgcaccgttcatcttcttaaccgcccaaacaccaatcatctacatcgtcgttttatacgccgtccggatgttcgggatttcaatggtcatgatgccggttacgacttctgggatgaatgctttaccaatgaacttaatcagtcacggaaccgccgtcaacaatacgttccgtcaagtcgcaagctcaattgggaccgccgttttaatcagtgtgctttcaagtgtcacgaagaacaatgtgccatcaaatcacatgcttaaaacattaccattggcgttccgcgataaagcgattgatgccacactttcaggttaccacgcggcgttcatcgttgccgtgattttctgtgtgattggcttcatcatcacgttcttcttaacgtctaaaaaatcaactattcaaggggggactcaagcatgattatcatcaccttaattctttgtaccctcggtttattcctggcttccgtctttagtaacggcctttcccgcggggttttaatgaccgtcttcggtttagggttcatcgcttcaatctttttcatcgtgcaaaacgactataatcatttcggcatgaaaaccgtcaccgaaacgaaaacaacgtcgctagtctccaccgccgacagccaaggtccttcaatgctcctctaccatccacttggtaacggcactgaaaaagtctatctttatcggaccgacattcaccaaagcaaaccgaaaacaacgcagacgactaaaaccaccaatacggtcaaagtggtcagcaccagtcctaaattagtcacaacaacgaaataccgggtctacaaaaatagccaagcaaaattctggtttggcttagctggcaataatcatcaattcgtcagccgtcacaatcaattcgacattcgccaaaactggttaaccctcagtgatgtccaagctaaaaaattagctaaaacacttaagatccaacaggcaagtctcaaaatagcagcgaccgcctatgctaaaaaagcggtgatggctgccatgcaacaaacaccaacgatgacgactgcgcaacaacaagcagttgctaaaaaggctgcccaacaatatcaacaacaagtgattgccaaagcagtcgcaacattaaagcagtaagtgcgttgagttgcgactagcaacttccgttcaaattcaaaaaaatcgtctatcctctggtttcgggataggcgatttttcaacttgatactcaaagcctgaccaacttgagtcagcactcaaatcataacgtgcgcctcaagtagccttttccggttaactacaaaatcaccaattatcttaagttcaagataactggtgattttttgttaatgctcaattgctaaccgcaactcaacacactcagcttttttcgttattcaccttgattttcacggtcgcgcattgcgcgataccgcggataattttgttgttgccataactgttgcgtataacgatacgccggtgcaaacggatgattcaactgaccttgccatggtttagcatgaccacaaaaatgaatcaaacccggtgattgacgcgcttcaatgtaggctttagcgcccgccacttcaggatgcggcacttcattaagcatcatataggtctgggcattccatttcggatgtaacgccaaccagcgatcgtgcaacaccgcgtttaacgcgtcttgatcgtggaaacgtaatttctcaggattttgattaatataatcaaccacctgttggctaatattagccgcccgccacttcgctaaatcaatcaataacattccggaattaaaataccgatcactttgataatcgacttgcatctgcgccaagcgattatggaaaccggcatcctcgacggccgccaaataatggtcacctaatgtcgtttgccataacacacctaaatccgtctggcataagaagtcacagtccagatacaaaatccggtcaatcgccggatcagtgatgattgtcggaattaagattcggtaataagccgttttcgtaatccgcgcactttcaacggcttgtgccaataattgttcatcaacttggacaaacgtcaccggcacttgatagcgacgcgccactcgttctaagagttgtcgatcaaccatcgtcaaatgatcttccatcacatagaattggtattggtgtcgtcccgtattgtgagtcataatcgaacaccacagagttgctagatggggcacaaattcagaattagtcgctgaaatcactcggattgttggattcatttgaatttttggctgactttcatcttgatttaataccgctaaataacgactggtatagggatgacctttaagcgtgttccacggtttatcgtgtccggtaaaatggacaatcgccggttgctgaatggccgcttgataccactgcgcatactgttgattaatcggttgatggcgttgaaatattaacgatgtttggacgttccatcggggttcaagcatctcggtactgctggctagaatcgcattcaaggcgtcttgatcatggtagacaatccgttctggaaattgattaatgtaatctaacgtccgctcactaacttgtgcgtcctcccaccgatcaatatcgatcaccatcacgccagaattaaaatacagtgcctgccgtgcttcagttttagaatacccgagtctttccaacgttaaagcctgccctggatcaatcaccgcaccgataatgttgcggtgcagcgaacttagcactaatggggtcacatcggtttgaataaacgtatccgcatctaggtataatacccggtgccaaccctgttttgccagaatcttaggggcgacaatccggtaataggccgtttgattaatatgatcactttcggggcaattgacaaataattcggcatctacgttgataaacgtcaattggtggcctgcgttttcgactaaagattgcaattgttgtttagcaactggtgtcaaatgatcatcaataatgtaaaaagcgatctgagtgtccggcgcaatcgttgtgatcgtcgaagtcagcatgactcttaaaaaaggtacatattcttgattagctgctgataagatggtaatttttggcaattgaatcccctcctttaatcaatatcaaaatccgttgtactatcttcagtgtacaaaattactaaaagcagcgacaagtttattgcctaacctaaaataaccgataatcttaaacgtgcttctcaagtagccttttccggttaactacaaaacaggcatcatgagcaaaaaagcgctcataatgcctgtttttaggactcattgatttgatactcttctaaaacctgactcgcctccgtccaatacccataagagttgatgaactcattgatttgatactcttctaaaactatagtcaatactgatatagctcaacgtgtgttgatgaactcattgatttgatactcttctaaaacggtgataatcaaggtgattcacgtgtagcagttgatgaactcattgatttgatactcttctaaaacgcagagttcattaaatatgctaacagagtggttgatgaactcattgatttgatactcttctaaaacgaattactgagaagggaggaatccccttaggttgatgaactcattgatttgatactcttctaaaacacggcaatgtaaggttttctccaaagtgttgttgatgaactcattgatttgatactcttctaaaaccaggcttactgctggaagtttcataagcaagttgatgaactcattgatttgatactcttctaaaactgcagttatttattggctagcaacacacgtgttgatgaactcattgatttgatactcttctaaaacatactctttggatctcttgttaccatacaggttgatgaactcattgatttgatactcttctaaaacagcacgtactctcgctgattgacctgtacggttgatgaactcattgatttgatactcttctaaaacgggaatagctcgtccatcttatacatctgtgttgatgaactcattgatttgatactcttctaaaacattcggccacattgacgttcttagcggtttgttgatgaactcattgatttgatactcttctaaaaccgtagtcggtttttaatgaagtcaactcctgttgatgaactcattgatttgatactcttctaaaaccttaccgtccttgatgtattccgcaatgtagttgatgaactcattgatttgatactcttctaaaacccatggctatacctccgttgggctaaataggttgatgaactcattgatttgatactcttctaaaacgcgtgttaaactactaccaccttttatttggttgatgaactcattgatttgatactcttctaaaactactcggtgtattggtctttggcattgattgttgatgaactcattgatttgatactcttctaaaactagatggtgccttattcgcaagggagccatgttgatgaactcattgatttgatactcttctaaaacggtcgtctaattcgataacctcaagtttaagttgatgaactcattgatttgatactcttctaaaaccagaggactatggtatatacttagtaggtagttgatgaactcattgatttgatactcttctaaaacctgcaatcagccggtttgggatccggtaaggttgatgaactcattgatttgatactcttctaaaactaatggtttagttaaagcatttgaacaacggttgatgaactcattgatttgatactcttctaaaactggtgcgattgacgttagtgctaggcataggttgatgaactcattgatttgatactcttctaaaacgtcaacggctacactgtggaaaatgagaaggttgatgaactcattgatttgatactcttctaaaacgctgctaaggacgcgttaaccaatgcgggtgttgatgaactcattgatttgatactcttctaaaactgtcaagtgcgttgtaaccaccattgccacgttgatgaactcattgatttgatactcttctaaaaccagtcacggttgcagtaccgacagctactggttgatgaactcattgatttgatactcttctaaaacctaaactatgatgtgtttcatctgtaatgagttgatgaactcattgatttgatactcttctaaaaccattgatgcttgaataatttcaatcattttgttgatgaactcattgatttgatactcttctaaaacttattaacccacttccaatcaactttaacggttgatgaactcattgatttgatactcttctaaaaccatattggataagatgttatttaatcccgtgttgatgaactcattgatttgatactcttctaaaacccaactgtaataatttccagtggcaacccagttgatgaactcattgatttgatactcttctaaaactcatccaacaattctaagttttttgcctgtgttgatgaactcattgatttgatactcttctaaaactatccgttcaatgcaacttacgtaacacacgttgatgaactcattgatttgatactcttctaaaactcgctcgataacggtctaatgattcagcaggttgatgaactcattgatttgatactcttctaaaactaatgtaaattgaatatatccgattgtatagttgatgaactcattgatttgatactcttctaaaacctgtttgagttctaaagaaaatatctacctgttgatgaactcattgatttgatactcttctaaaaccatctgtatgtctaaacccagttaagtctggttgatgaactcattgatttgatactcttctaaaaccgtaaatcatgactcgaaataaatcagtctgttgatgaactcattgatttgatactcttctaaaaccgtgcgtgcattaattacttctgtcagcaagttgatgaactcattgatttgatactcttctaaaactcagtggtttgaagtcagcgtggggtaaaggttgatgaactcattgatttgatactcttctaaaacgcaacaggtcaatggctgctcgaacttcatgttgatgaactcattgatttgatactcttctaaaactgttaagcacgagtggtagacttatcgtcagttgatgaactcattgatttgatactcttctaaaacaaagcattggaattgatgtattatatgtaggttgatgaactcattgatttgatactcttctaaaaccggaggagcgattatggtgcttgcttctgggttgatgaactcattgatttgatactcttctaaaactgaagctcaagcaagaaaagctaaggcagagttgatgaactcattgatttgatactcttctaaaactttagaatacgtattgacaaatttagcaaagttgatgaactcattgatttgatactcttctaaaaccggcgattgtcacgccaaccgatgcggtgggttgatgaactcattgatttgatactcttctaaaacattgatacgggtatggttagggtatcggtcgttgatgaactcattgatttgatactcttctaaaactgtactatctcactagattgaacgtagttagttgatgaactcattgatttgatactcttctaaaactagtcgtggtagttgttgacgttccggcgggttgatgaactcattgatttgatactcttctaaaacataaacgtgaggctgaactcaatcaacgtggttgatgaactcattgatttgatactcttctaaaaccggttaatggtgggtttattgtgcataattgttgatgaactcattgatttgatactcttctaaaaccgttattttttcatcattccttcatctgaatcataacgccactcgacataatcggtgtcgatatgataataccggcattcttggtacctagtcgggtttgaggtttctgaaaattcgatgataaagagtttcacattcaacgtcgccattaatcttaccaattcattaaattggctgatactaagataatgagaaacgttcatcaatacaataattttagtttcatttaattctgaagcagtcaatactatactctctattataccatagggatcggtttggatatcatttgaaaactttaaattaaagtattttagcgctttttgaacgtccaactctaaatcaatatcaagcgctaaatcatacataaaagcagcctctaaaatagcggcccgcatctgactatcaagcttaattaagttttgacgctgattatccgttaaatccttcgccatttttttaatcaaacggctttgaaataatttattgggatctagcgttgatatttcaccaccccataatacactcttaacaatatcgattaattgatattggtcatcgctgattttaagcgtctcttgttgctccttaaaacctgcaattaatttggtataaacatctgctgagttggtactaaaaaccgttattttctgattagtcatttcaaatggccgataaggatacattgtaattctcataaaatcaacgtcctttctgccgaattacgcacatcatcttttgattcaccgaccaagaaatgcattttattgtattgttgttccgtcaccattaatgtttgaatcaacccatcttcaggcgtaaatcccgcgattcgattttcaatgaattgggctgattgtttactgacacaaacgcggacgtagaccgaatactgaatcatcaaaaaaccttcatttagcaatgcttttctaaaatggcgatatgcttttcgttcaagactcgtttcagttggtaaatcaaacatgactaataagcgcattatgcggtacctcatgacacatgaccacctttacttctaaagattgtttcggattactcataaaattcaaacaattctgaacgtgtttggttaacgcattgcgtaaaatggtcacatgaccgttatactctaattctaagttcaataattcaaccagaccaaacttaacatcagccgttaattcattaaacttttggtgagccacccaataatcaatcaccggtcgaaagggttccatcaaatccgatcccaagttaaaatcattcatcgcattgtgatgatgaaccccaaactgggttaaataaccgttacagacaatttcgcgattaaccgccgataataaaagactgtagccatagtttagcgcggcattcgttgcattcgcatcagtccgtgtgaaatcttgaccgaacatcttttgaaaatatttacgtgcaatcaccgcttctcgattactctggtcggcaaactcaatttgctgggcttctaattttaaatcagtaatatctctacccaataattcagcactttgaatttgcatcgcaattttagccttcacaacggtagtccaaagcgtgtctttcaattcagttgaccaatcaacttgttgctgaatcgatgccaaactgcgattacctggataatcatcaaccacttcacaagctggattgccatcccgcccggtaaagataatcttagccccagaactacttaattcggtaattgccgtcgcggttactactgcttgtgtggtcgccactaataaaatttgaatatcatcaattggtacctgatgtgttgcatcgttggtttgtaccacaatctttcggcccgaatacgacacctttgcatgttgtgatatcacaaccgttcgccatcccatattcctcactccaattaatcattttgtagtcttgtttcttaaaacaaggcgtgttatacttcagttgttgagcctgatactctcaaccgataaactcattgatttgatactctgggttaaaatcaaacgaaaccttcgggttaagtttttacttctgagcctcgtatgaggcctttttttatgccttcatttcagataaaaagctggttcgtcattcattaaaatgacgaaccagctttttttggtgctataaatctttcaaagccacacgtcgttcaaatagaccggttggtgattgatagatgatttgagtatctgaagctactattcctgattttttttggaacattccaaatggcattgctattcctaatggttttaaatcactcatagcagcattagcatgtaacccaatcaaaattcgattcagtattgttttctgcccagcttgaatcattttccgattttcccattgatcttgccaaggcaattcattaaatatctctcgaccttcagctaatttttctctaaagctgctcatgtcataaagtgggaaatgcttctgaacccgttctaatatttgatcataaacaactgttgcctgtgccttcaactcagcctttggcaattgaccatttaacacttgcacggcttttttatcaagtactaactcttgcgcattatttttataagttgccgatgccaatgttagttcttggccaccgtcgtagaaccgttgattaattaaaattttcggtaagagcacttcgaatggtttaacgactgtcacaacttcatctttttgctttttagtcgcggaaaattgaggcgttaataatgcagtcaatctttgcagcttaatcgttgcgtcttcaatgtgttctagctcatcaacccaagctgtttgcaccccacaaatacgataaaaatcaccctttttttcagtaattcgcactaaacacatataagcgactgttttaccagaataaccaccataaattgccgttggtcggttttctttagctgcaatcaattgacgaccaccttgaccactcgctttgtcatctttagctttatagagcgtctgattatacaacgcgccgtgattagtatgcacttcacgcgtcaccagaattttcttgaaatcatagattttattcatataagctaaatcatggtctttttgccaaataagctcacccgtttcagcatcgacctgttgctcttgacgtaaaccatttagaaaattaaagttacgccactggtcattggccttaaaaccttgttggtattgaccgtagacgaaataatgggccaatttagggtatttcttcagtaaatagaggcccacaaaagccgttagatacgcatcaaaagcgtgatggtaattatttaaatttcgattcttaggaaaatcaaaatcttcgcgcatttggtgggttaagccacttttaaccgtcactaactgcacgtcttcatcggcatattgatcgactaataagttagttgcgagtttaatcacttgccgggtttcaactaattggcgattgataaagccactcatggtatatttattgagactatctggatttaacgttaaattattatatttacggcgcgtcagcaaaccggcccgtaacatttgttcccactgactgcgcattttttgcccaaatcgttcttcagtaaaatcaagcggtacgtggtctgatttactccgattcatttttgccgatactaatacccggttatccaacgaattatctttgataaaggcttgcggtaaaatatgatcaatatcatactccgataaccgatcaatatttaacgactcacccgtatacatatcccgaccgccttgcatgaaatacaagaatagtcgatctttcgataaattagcatactgtggatcggccaattctttgttgagctgatcattatttagctcttgatagacttgttcaacttggcgacgccgttgtgttgataatcgcggattagcttgtttttcacgcgcaaattcgattaaaatccgagccggtgcttgccccttcatcgccttttgaatatcggccacgactagtaatatttgtcgtagagcttttttattggaaggtgacgtgtataactcgttaattacatcttgcgtatcattatccgctaataacatttggttagcttgagtcacggcctgatcaaaatcatcagaatgaataatccgcataaaattgtcattggtattccaaagaatatcgataatccgttgaccattttgatcgacaattttggttaatagtttagtcgataattggccccaaccacggtaccgtttattcgatagtcgctggcgttgttcgtctgttaaccaattaatttcacgtaatttatcagcaaatattttgccatcctcaaaaatcgttgaccattcaatcattttttcaaaatcggtttgcttattagggtcatcaatcatatccccaaagattttcttaagatcatggtaagtactcaaactactattaaatttctcaccatctgacaaacccgtaatgtttggtcgactcgcatactgcccctcagagacgagataagcttgaatatttttaaccgtaacatgcgcttgttgcatgaatttatcgttaaaaatggcttgcttttgttcgaccgtaatcggttgatcatcaattttaatgccattcaattcatttaatacttcaaagcattgatacaacaaactttgctttggcaaaacatcttcggccaacaaataagtatcagtggttgtcattcgtttaatgaattcattcgcggaagcttggcggtcgactttctgatcaaaattccacggcgtaatcgcgcctggttctttacgaatcatccatgcaaattttttattagaagtttggaactgttcttcagccgtaatcatcgggccgacgtaataaggcactctgaatgtcaccaactcatctaatttatagggcgccattttttgccgttgttcattggggttaatgtccgccaaccaaggataatattgtttttgattttcaataatttgatccaattcctgttgatgtaactggtgtggaatggcgccgttgtccttagtgcgttgtttaggcataaactgatccaattcaatcaattttagaatttcgataatatttgtatcctctgaatctttttttaatactttcgtgattgccgcatagaaatcctcacgtgaaccgtgctgcttatcttccggatgatcaatatagtcatcatatgccttttcaagtgctttattttctttatcagataattgttcgcgaattgaccgcaacattatcagatgtgctttatgcgcttcatacttatcaatcatcgcctgtgaaattgattgtccctcaggcacaatcccagtcagtaaaacacctgaataaagagctcgtaaaatttcaatgatttgtacggcgtcatcattatccgcaatatttaagtcgctcaacttagcatcaaaatcttcagcattaaaacttaacgtccacgctttgacatcttcgacttcgatacctgtgatgagattaaatttcgcctttaagcctagaatcgctttcaataattcagttgcaattgctttatattgcttttccgaatcttttgaagcagcggtttggtaaattaacggtagtgctttgcgttggcgcacactagcgcttaaattgttatccaacaaaattgatttaatctcatctaaattgctttctgataaactgaagccgacttcactaaagattgttccaaaaatctgatttaacgctgcgaaatccttagctaaatcaatttctccgcttttaaaagatgacgcggcagctgcgttcaaaaaatgcccccggtatttgacaatgtgatgcatcgccaaataaatttcgcgtaaatcaaattgccgcttttcagtcattaacgcgtagcgcaaatgataaattgtcggatattgatagtgaaaatcgctgtccaaacgatcattaaataaaccaatttgtggctgctgtttttgtaaatccttggggcttaaattcgattgtttctgtcttaagaaaaaagtcgcatcttgcggtgtgatgtaaggttcaaaaatttcgcgtaataaacctaagcgccatttacgccgttttaagcggcggcgcgtcgttctaaacagtcgtcggtcttcagctgtttgaccttcatcgtacagtcgaacaccgtaccctaattttcccttaattctgactaactcactttgatcattaaccactgaccagccgatagaattggtcccaatatctaatccaatattatatcgcttattcatattatctgatccccctaatcacttaataagtttagtataactattttgtaaaggctttaccactcaaattaaagtttgcacaaaggctcacaataaaaaagacgccacctgaaggtaaacgtcttaatactattctattcgactggtaaaactgccccgtgccatttatttttgatccaagtttgcgttgattttgatttcaaggccttaaccagtttcttaatcgctggtttgttttgatcacctttgttgactgccacgatattcgcgtatggtgacgattgtttttcaagcgcgaccgcatctttttcgggattcaatcccccttgaacggcgtaattcgaattaatcgcgaccaaggtgccttcattatttttcaagagttcgggcatgagtttgggttcgaacgtgtattcaaacttgagatgtttaggattagtggcaatatccttgaacgttgcattctcagcattcacatcggcctttaaggtgatcaagcccccgtccttcagaatcgtcaagacgcgaccccaatcaggttgactgctggagaccaacactttagcgccgtctttaacttcactgagtttcttaacctgcttgctgtacagccctaatggttccagatgaatactgcctgcactgacgagatgataaccattatccttgttggccttcttcataaaagggacatgttgataataattggcatccaattcaccgctgtccaaggctttattcggtagcacgtaatcgctgaacactttaatcttaagattaacgccctcttttttcagttcgggttgaatgtgtttcaagatttcagcgtggggcattgctgaagcccccacggtaatcgtattactatcggcttgctttttctgaccacaaccggctaaagtaactccggttaataagacagctgcgactacaaataaactttttttcataattaattcctcctaatttttaacggtgatcgatgtgtttgaccactaaatccccagctttttgacaaatgaaaacgatgattaaaataatgacggtcgcgaccaatgtaatcgtattctgattggcttgaaacccatcttgatacgcgagattcccgagaccacccgcgccgatgaccccggccattgcggtgtagccaatcaatgaaatcgcggtgaccgttaaaccggacaccagtgctggcaaactttcaggtagcaatacttgccaaaccaattgccatttcgatgcgcccattgaccgagtcgcttcgagcaccccgccgtcgacttcgtgaaacgctaattcgactaaccgcgcgtaaaaaggtgcggcggaaataatcagtgcggggattgcagctttgggaccaatcatcgtccccatgatgcccttagtcaacggaatcaataatacgattagaatgataaacggaatagaacggaaaacgttgacgcataatgccacgatgccattcaatacgcgactcattggtctttggctttgacccgtttggtataacatcaatccgagtaggaacccgagaacggcgactaagatgacgctcatcgctgacaaccaaactgtttcaaaagtcgcttgccacatggttgcccaatcaacctgattaaattgaaaatacgattgaaacccattcacattagtcatgacgaatcacctccacttcgattgtttgttgcgctaaatcggctagaaccgcttttaaatcagttggatcagcttgaatctggatatagagatagccgagtgctccgttaacggtttgctgtaaactcccactaatcacgctgatttcaattgcttgatagcggcgcatcagttgaccaatcacgggttgaactgattgttcctcgttgaaccgtaatttaacgatgctgccattggggacgcggtttagtaattggtcaattgacgcttgggtttcgctcggggtcacgaccaatgattccgaaacgaaagctttggtggccgctgtttgtggtcgttcgaagatatcgtgcacgctaccttcttcaatcagttggccattttccatcaccgcaattcgttgacagattcgccgcaccgcatccatttcgtgggtgactaacacaatcgtaatccctaattcgcgattgatcttcgctagtaacgttagaatcgacgccgttgttttcggatccagtgcgctagtcgcttcgtcacacaatagaatcgctgggtcgctaatcaaagcgcgcgcgattgccacccgctgtttctgaccacccgataactcactaggataagcggcttcgtaatcggttaactcaacaagctttaataattgacgtgctttggcaaggcgctgctttttattaacgccgattaatttgagtggtaacatgatattatcaatcaccgttttcgaccaaagtaagttgaaatgttgaaaaatcattcccatcttttgccgaaccggtcgcatcgcttgttcacttaaaccgatgatcgattgaccattgactaagacatcaccactcgttggcttttccaaaccattgaacaagcggattaacgtacttttacccgcccctgaataaccgatgatgccgtagatttcgccatcctgaatttcaagtgacacgtttttcaaagcttgaaaggtctccccttcacgcgtaaattgcttattaacttgctgaactgttaacattgaatgccctcctcgtatgcctagcgctgaaaaaatgagtaaaaaaaaatccttcctctcaaaaatcgagagaaaggacgccaaaatgcgtgttaccaccttaatttacgatgacttcacagccatcgccttacaaagtaccagattgatactcgttcgctatatcgggcaacccccgcaccggctcagtaaacctcaccaaatgaaatgctcaaagaccatattcaactaaggttcacattatccgcttgcacctgaccggactctctaagaatgttactgcttaatctactcatcttttcatcgcttgttattaattgtcttttatcttatccaattcaaattaataagtcaagcttattaatctaaaaaaattttttcacgattaaaaatcgacctaatcaacccgaacgtcggcgatccacgcatctttttcattatccgcgtttaataattcgggactatcagctaatgcggtgttgacgttgactagctcacctttgattggactatctaaatcttggaccattttttcggcttcgattgccactaatgtttcatccttcgtgacggtctgaccgactgctggtacatcaacaaacttaatttggccaaattcagattgcgccgctttggtaataccaacgcgtcgaatcgaagccgcaatttcctctgtccaaaaataatcatcgttactcattgccactttgtcttcactcctagaaagtatcttctgattcactaaacatgtaactcttgtaatgataccgcatcgacatcataaaaccaatcccaatcatgttccccagtaatgaagaacccccctgtgaaataaagggtagcggaatccccgttaatggcaatagtccgacactcatcccgatgttttcgaaaacatggaataaaatcatcataatgaccccggttgaaacgtaagcgtaaaattcatttttcgtatcaaacgtaatccgaatcatctgataaatcagtaggaaatacaacaggattacaaaacaagaaccgatgaaaccaaaattttcaccaatcacggaaaaaatcatatccgattcacgaaccgggacattgacttgaatattattaaagcctttaccgaataattgaccagagccaatcgcctttaaactttgtgacaattgcaaactggtactagccgtattgtcgaacggatgtaaccaagcgtcaattcggttaaattgatacgtcttaaaaccgacatgggtcaagattgctcgaccccaagtcgtggccgctaatgacaacgcggtccccccgattgcgcctgcgaccgcgattgttggtgctaaaatcttccaagtgacaccggaaactaaaacgacgccccctaaaattgcaaaaaagaccaacattgtcccaaaatcattttgtagttttaacaagaccatgacgggcaatgtccatagtaataatcggcctaataataaccaatcagaacgcatcgtgtgttctgaatattcggtgttatgctgggtgacgacccgccctaacattaagatgtaggccggtttcatcacttcggacggttgaaacgagattggtcctaaagcaaaccaacttttagcacccgtctgtgtagcgacttgtcgattatagaggaacaagacagcaatcagcaagaaaatcccgacaccatagaccagtggtgcaattcgccacagttgttcagaatcaaattgcataataatgacaatcgcaatcccaccaatcacgtaccagacagcttgcataattacagctcggacgggatcactgccacttgtatcgtgtaagacggcgacataaatcgacattaatccgactaatgccaacataaagaccgaaaagacgattccgtaatcgattcgcgacgtctcttctgttgtttctaattcttttggcatgttaaatctccttcaatcaatctgcttttattatataaataacccggccaaaatgccgccgggctacttaaaactaagcaattcttaagaattaaccttgatgtaaatggtattccttaagcaattcattgaccgcatcatcgtgtgtttttgtaatgattatttgcttcgtaccggtaaccgtggcttcaaaacgcttcttaacgctatcttccacaattacaccaatttcattcttaccgaccataatactggtcatcgcttgaccgtcacgagtgatatcgtcaatagtgacttcaatatttttttctttttttgacataactatttaaaactcctctgtttagcgctgcgccttgttgcggcgtaccgtaaaataatctggcacggggtcgtaaccacccttaataaacggatgacagcgtaaaatgcgcccaatgcccataatcagccctttgaaggccccgtgtttttgaatcgcttggatcatgtaactcgaacaagttggataataacgacaactaggcggtaacaatggcgaaatcccttgctgataaaaccggaccaacataattaacccttttttcatcttgacccacctactatcgaactattgtaagaaattaataatgtgactccaagtacttggtaagaaaaccccaaacggattctgaccgcccatcgcaaaaccaatcatctcacccactaagagcgcaaggatgatcaagacaatgactaagagtattttcttaagtaccggtttaacatgttcattaaaatttgattgatacacgatttttcacaatcccttactgatattccgatgcaccttaatgcgcccgtttatgttccatattatccaataaaatacccgtcccgattgcgacggcatctaacggattttcagctaagaccactggcaccttgagatgttcagcaaataagttagcgatattccgcaatagcgcaccaccaccggtcaacataatcccacggtcaataatgtccgctgataattcgggaggtgtcacttctaagacttctttagccgctgcgacaatttccatcatggtatcgtgtaaggctgattcaacttcatccgctgcaatcgtgactgattgtggtaaaccagtcaccatatcacggccccgaatttcaagggtttcgctagcatctgcgtgccaaacgttcccaatcgttaacttgatggtttcggcactgtgttcaccaatcagtaaaccatgttttttcttaacgtaggcggcaatttcagtattcatcttatcaccagctaggcgcaatgagcgactcgtcacgacttcacccattgaaagcacggcaacatcactggtaccaccaccgatatcaatcaccatgttaccccgtggttgaaaaatatccatgcccgcaccgacagccgctacttttggttctaattctaaaaagaccttaccgccgcctgatttttcagccgcttcaataatggctttttgttcaattgacgtaatattagttggacaacaaattaagatatttggttttgataaaaaacctttaacgtttaatttattaataaaataagctaacatttcttctgtaatatcaaaatccgcaatcacgccatcttttaagggacgcactgcatgaatgttgccgggtgtccgacccaccatgctgtaagcttctgagccgactgctaaaacctttttcgtttgtgtatcaatcgcaacaactgaaggttcgttaaggacaatccccttaccttttacattaattaagacgttggctgtccctaaatcaatcccgatatctttagccatttagcgttgctccttccgaaaaccatattcaatactaaattataccacacggtactttgcaataacatataagatttattaacgcttggccgacaaaaaaactgaatcagcaaatgctcatccagctctcgatggtgcttattaagctaatttcgcttcattcttaacgattatttgacctttagcgtcaaaatcagcacggctaatgtgcgcgcctaatgcccgtaatttctgatggaaatgataataaccacgatccatatattggagattggtcactaacgtttcaccattcgacaccaaaccggcgatcactaaagcagcggccgcccgtaaatcagaagccgcgacttcagcaccattaaatttcgtcggcccataaagtaggacagattggccttcaatttgataatcagccgtcatccgacgcaattcttctaaatgcatgaaccgattttcaaacaccgtttcagtcatcacactcgtgccatccgccatcaattgcaacgccgtcatttgggcttgcatatccgttggaaaaccaggatatgggagggttttaacattactgggtttcaaagtcgctggtccgatgacgcgaatacccgcatcttcttcaatcacttcagcacccatttcaactaatttcgataataagggcttattatgttcagcaatggcttcttgaatcaagacattaccgtgagtcgcagcagcggccaccataaaagtcccggcttcaatcctatcttgaacaatactgtgttcagtcccacttaaacgggtcacgccttcgatccggattgtttcagttccggcaccaaagaccttcgcccccattttatttaaaacgttggccaaatcaacaatttcgggttcgcgagcaacgttatcaattgtcgtcgtccctttagccatcgtcgcggccatcataatattttgagtcgcaccgacacttgggaaatctaaataaatttcagtcccgactaactggtctgctttagcctcgatgtaaccattactttgggtaatcgtggcaccgagcgcttcaaaaccctttaaatgtaagtcaaccggccgtgaaccgatggcacaaccacctggcatcgcaacgcgggcatgacccaaacgggctaaaagggggcccatgacaacgattgaagcgcgcattttagaaacatattcaaaagcagcttcaaaattcaaaggttgtgtcgcatcaatcacgagtttgttgtgcgcttcatcaaagttaacttgcgcttccaaactctttaaaacgtcttgcatcataaaaacgtccgataaaatcggcacgttggtaaattcgactggaccgtcttctgctaataatgccgctgccataatgggtaaaacagcatttttggcaccttcaatgtgcacatctccgactaaaggttgtccaccttgtatgattaatttttccaagagtttccctccgctaaattggcttgtttaattaaactaggaacatgatgttcctagcttgtgagataatttctaaaaagaattgactgactgaataacccatcacgattgctaaaaacatcatcacaatctgaacttgtcgcatatgattcggtttaaagaactgctccaaccgaatggcttgtaacccataaaaactaatcacgataaagcccatatgactaataattgtaacgactgcttgtaatccaattgattgcactgaactgatgctccttttgtgatatacggacattgtaacatatcaaaaccagatttgtctgcctctccgcagcaatcttaaaatatgtaaaaaaagcggtcatcaccttatcagtgacaaccgctttaattgaattgcttataataaatgatttttaacgttaatccggttcattgcacgttgtaatgcaatttgagcacgaagtaactcatcagtatcatgtttttctgaagcggtcttaatagccgtttcagcacgttgcttagcactttgagcacgatcaatatcgatatcacgagcacgttcagcactgtcagcgacgattgaagcaatattatgactgacttccataaaaccaccgttaacggcaatcgcgtcttcatgtccttgattatctgttcgtttgacacgaagttcaccaatctctaaaggggtaataattggctcatgattagccataataccaagttgcccagccatcgctggcacaacgaccattgaagctcggtgatcataaacgatcccactaggcgtcacgatattaacggttaatacgttttgtccttctgccattcattagcaccccttcctaagcttgcgttgattcttgttcggattgtgtataacccatatcctttgcctttgctaaaacggcatccatattcccaactaaacggaacgcttcttcgggaacatcatcatatttaccagctaaaatatctttgaaaccagtaacggtttctttaacgggtacgtatgatccgggttggccagtaaaggcttcggcaacgttaaagttttgtgacaagaagaattgaatccgacgtgcgcgggcaacgatgattttttcatcgtctgacaattcatccatccctaaaattgagatgatatcttgtaattcacggtaacgttgtaaaacgtgttgaacttctgatgcaacgtcgtaatgttcttgaccaacgatttcaggatcaagcgcactagaagatgattctagtgggttaacggctgggtaaatcccttgttgcgttaacttacgatccaagttggttgtggcatccaaatgggcaaacgttgttgcaggtgcaggatcggtataatcatcggcaggcacatagatggcttggatagatgtcactgatccttttttagtggatgtgattcgttcttgtaattgacccatttcagtcgccaatgttggttggtaaccaacggctgaaggcatccgacctaaaagggcagaaacttctgaaccggcttgtgtgaaacggaaaatattatcaatgaacaatagtacatcttggccttcaacatcacggaagtattcggcaattgttaaaccagtcaaggcaacacgcatacgtgcaccaggtgattcattcatttgaccgaaaaccatggcagtcttttccaaaacgcctgattctttcatttcaaagtataagtcattaccttcacgtgttcgttcaccaacaccagtaaagacggaaataccaccatgttcttcggcgatattatggattaattcttggattaagacggttttaccgacaccggcaccaccgaacaaaccgattttaccaccacgcacataaggggcaagtaaatcgattaccttaataccagtttctagaatttctgaacttgtatttaattcctcaaacttaggcgctgaacggtgaatactgtcgcgtctaaagtctgcaggaaattcttcaccgccatcgattgtttcacctaagacgttaaatacccgtcctagggtttccttaccaactggtacgttaattgaacgaccagcatcttcaacgtccatcccacgacgtaaaccgtcggttgaatccattgaaatggtacgcattaccccatcgcctaattctagtgctacttctaagacgacagtttcattattgcctttatcaacgatcaaggcattattgatatctggtaaagtcgtatctaaagaaaattcgacatcgacaacgggaccaataacttggataacctttcccatactcatgttgttatcttcctcccgcgtttcttattctaatgctgccgcaccaccgacaatttcggtgatttcagttgtgatttgcgattgacgtgcccggttatatttaattgacaaatcgccgattaaatcgttggcattatcagttgcactcttcattgctgtcattgaagccgcatgttctgcggttttagaatctagaatggcaccataaattaaactctcagcgtattgcggtagaatcgcatctaaggcgtcttcaacagaaggttctgtaatgtaatctaaatcttgatcagcaacttctgaaacatctaaatcggtcacgggtaacattttttcagctcgaaaaccagatgctaatgaattgatatggtgattgtaacaaacataaagttcatcaaaaacaccactatcatacatggcaacggctgttttaacgatttcacgaacttcattaaaggatggcacatcactgacaccacgatattcgtaggtcatattcatgtggcgtgctttaaagaaatcagcgccagtcccaccgaccgccataatagcgtaatcgtcagcagactcgtgattagttgaaatcatttcaaccatggcttttaaaatcgaactgttataagcgccaactaaaccgcgatcactggtaatcaccaagtaaccggtctttttaattggtctttccactaacaaattacttaaagtgattgtatgtttcatcgcttcttgttcagtcatattgactgtttcagtggctttgacacccttctttttgcgagccatgccaattaattgactagctgctaaatgagtgacaatttcccgaatcttatccgtataaacggaataagcgattgaatttttttcaatctgagaaagtttagcccccgaaaccatttgcatggcacttgtaatttgaccagtttttttagtagaggcgattcttcgtttgatatccattaaagattcagccaattaattcaccccttacttatctgcgtcttgattgtcagcatcttgtgcaggtgcaaaaccttcagtgaaggctttgattgccgcatcaagtttgtcagtatctggcaatttcgctgattgacgaattgtgtccatcaagtctttcgcagtgctttcaagataatcagttaagccactttcataacgagcaatgtcatcaactggtacatcatcaatgaaaccatgcgttaacgcatataaaatggttgtttgttgttcgaatggtaatggtttatgcagtggttgtttcaaaacttcaaccgtccgtttaccacgattcaacttcgcttgcgttgacgcatctaagtcagaaccgaattgcgtaaaggcttcaagttcacggtatgatgaaagatcaagacgtaatgtcccagaaactttcttcatggctttcgtttgagcagcaccaccaacccgagaaacagatgaaccagcatcgatagctggccgggttcctgaatagaataaatcactttccaagaagatttgaccatctgtaatcgagatcacgttagttgggatataagctgagatatcaccggcttgggtttcaatgattggcaaggccgtcattgaaccaccacctaattcatcacttaacttagcagcccgttctagtaaacgtgaatgcaagtagaagatatcccctggataggcttcacggcctggaggtcttctcaaaagtaatgaaatttcacgataagcggccgcttgtttcgttaaatcatcatagacgattaaaacgtgcttgccgttatacatgaattcttcacccatagctgcgccagcataaggagcgatatacaataatggtgcaggttggctagggccagcttccacgacaattgtataatccattgcgccgtaacgacgtaatgtttcaacttgatttctgacagttgattctttttgaccaatggcaacatagatacaaatcatgtcttggtctttttgattaataatggtatcgatggcaactgatgttttaccagtcttacgatccccgataattaattcccgttggccacggccaattggaactaaggcatcaatggcttttaaaccagtttgcaaaggttctgaaactgattggcgggccataacaccaggtgctttcttttcgataggacgcgtcttatcggttttgatttcacctttaccatccacgggttgacccaatggattaacgacccgaccgatcatggcgtccccaacaggaacttccataatccggccagtccgtttaacttggtcgccttcacgaatattttcatattcgccaaggataatgataccaacatcattactttccaagttttgagcgaccccgtatgaaccgttagaaaattccaacaattcactcgaaagggcgttttctaaaccgtgagcacgtgcaatcccatcaccaacgtaagtgacagtaccgacttcttcgacggctagatcttcattataatttgctagttgttgtttaattaatgcactgatttcctcagttttaatgctcatcaggttcacctctttatcaacgattgacttatttcaataataacgacttaatgcgatctaaaccgtgtttaacactgccgtcgatcactttattgttcgattcaagcacgataccaccaataatctctggatccacaataggttcaacgatgacttggtttaagccttcgcgtttagcaaaagtttgactaatctttgcaatttcagcttcgtctaacgccactgctgaagtgaccttagcgtaagcaattcccttttgatgatcatagagatcttcataggctgcaatgatgtaaggcatttctgccattcgatcataatcaaatactaaacctaaaaagtgttgcatcaacgtactaaaatcttgtgttaataattttagtagtttccgtttttttaatccagataaggttgtatcagtgagaagcggtcccaattttggattatcattgaaaatagtctcgagtgcttgtatctcatcatggatactttcaaattgttgctcttgttctgcaagggcaaataaggccttagcataacgctggccaactgcatacttatctaatttcattttgcttgtccaacccttcaatataggaattgatcaatgacttttgatcagtaactgacaattctttcttaatgagtttagaagcaatttcaatagatagttgagcaacatcatctctcgcactgtttaacgcatctacacgagattgttcgatgtcttttttagcattttgttttaaggtttggacttcctcttgcgcgagcgtaaccataccttcgcgttgtttttcaccattttgtttcgcagtattaacgatttcaacggcttctgatttagaactcttcaattcagtcgcgcgttgagctgctaattgagctgcatcttcacgtgattgtgctgcgttgtctaagtcattggtaatcttatctgaacgattctgcatcatttttgagacaggaccgaaagcaaatttaccaactaaagcaactaaaataataaaaaccactaggacaaataatgaatccccaaggtatgcaggagctccaacgattaaattactaaacatctattgacactccttccttgacttactgactaattttaaagtaattatagattcacttttatttattgaaataagatcaagaaagaaacgacgatagctaagataggaacggcttcaattaaaccaaccccgataaacatggttgtccgtaattggcctgataattctggttggcgagccatactttcgattgtcttagaaataaccttaccattaccatatgatgctgcaaatgctgcgactcctgctgcgatagctgctgctaaaaagttcataatttttttcctcctgtttttagtcttctatttcgattttttctgaaatatagaccatcgatagtgttacaaatacaaaggcttgaatcgatccgataaagacggaaaagccttgccataccatttgaatcggtgctgtcacaatcattgtaccaaaaccatttgagaaggccatttttactaataagtttagtaaaacttcacccgcaaaaatatttccgtacaaccgtaatgacaacgttaggaaattggtaaattgttcgatgatgttaatcggtaagaaaaagcttaccggcttaatataactcttcaagtaattcccaaatcctagtcgttcgacactaaagtagtgcgcaatgaccaagacgatcattgctaacgacattgtgacaattggatcggtagtcggactcttcagccaagtaaaaccatctatctttaactgaaaaatcaaaccaaacatattactaatcagaacgaagaagaacatcacaaaagcaaataagtaaaattgctgaccctctttgccaggtattgcgctcttcacaatcccgttcgtaaaatcaattgcccattccaagacattctgccgtttagtcggttttaacgcaatcttccttgataggaacaagacaatcgcgaaaacaatagctgcacacaataataccgataggcagttcgctaaattaaaacgaattcccaaaatgctaataatgggatatttatcatccacaagattccctccttccttaggcctattattcgttagcggcaattttccgattcagaactgcgtcaacgaacaacctaaaacacagtaatatttatgtatagaaaaaagcataaatcattaccgcaacacaattaagataataccaccattgatttgaaagtacaaagtaaatcattgaataaattttattttttttaattgactcacttaagatttaaccacctaacaaaaaatgcccacagacaaatgtctgtaagcactagggcaattacttagttccaaacagccgatcgccggcatcgcctaaaccaggtacgatatagccatcttcgttcaaacggtcgtctaaaccagcagcatagatgtcgacatctggatgggcatcttgaaccgctttaacaccttcaggagcagcgactaaaacaactaagcgcattgacgttgcgccccgttttttaagggcatcgattgccataatggctgagccacccgttgccaacattggatcaacgataaataattgacgttgatcgatatctggtggtaatttaacgaaatattcgtgtggttgtaatgttttttcatcacgatacatcccgatatgaccgactttagcggctggaattaattttagaacgccgtcaaccatgccaagcccagcacgtaaaattggtactacggccaatttcttaccactcaattgtttttcaactgcggatcccatgggtgtttcaatcgtgatatcttccattgctaaatcacgtgtaatttcgtacaccatcaattctgcaatttcgtttgcaacttcacggaaaacctttgtcccagtatccttattacggataattgttaatttgtgttgaatcaatggatgatttaaaactgtgaactttgccattttattgcccctatccttttcaatttaaaccggaaagaatctcaccaaaaaagagcgaccccaaagaaataatcttttgagtcactcccctttccgcgtaaattcctgttgtctattgtagctcagatagcgacaaaaaactagcattattccgaaattaatctaaaaattttgcttgggttaacggaaattgttgtgtgagttcgattactgcttcactaacagccgtcatcgtcgctaattcggcgtgtttttcaatcactgttaggattaattgtgcaaccttttcacaatcagattctttaaatccgcgggtcgtaatggccggtgtgccaattcgaatcccactggtcttaaaaggccctaattgttcaaaaggaattgtatttttattaacggtaatgtggacactatccaataggctttgaacttccttaccatttaaaccacttttcgataaatctaatagcattaaatgattatccgttccacctgagacaacgcgcactaaatcagattgttcaaaaacggccgccatcgcttgtgcattggccacgatttgttgcgtgtaagccgtgaattcaggctggagggcttcaccaagcgcaactgctttagccgcaatcacgtgttctagtgggccgccttgaataccagggaagaccgcagaatcgatggctttggcatattcttgtttacaaagaatcaaaccaccacgaggaccgcgtaatgttttatgggtcgtcgttgtcacaacatcagcatatggcactgggcttgggtgaacacccgtcgccactaaaccagcgatatgggccatatcgatcattaaataagcacccacgtgatcggcaatcgcacgtaattctttgaagtcgattgttcgactgtacgctgaggcaccagcgacaatcattttgggatgaatttcttcagcgattgtttttaacgcgacatagtcaatttgttcatcttgattggccacgccgtaacttgagaattcatacaattgaccactaaaattaaagggtgagccatgggtcaaatgaccgccatcggttaagttcatcccgagaatgtgatcaccaggttctaataaagcttgataaaccgccatattcgcttgcgaaccagaatggggctgcacgttagcgtgttcagcaccaaacaattccttagcgcgatcaatcgcaatcgtttcaatttggtcgatatattcacaaccaccgtagaaacgtttattcggataaccttctgcatatttattcgtgagcacactaccctgcgcttcttgaacggcagccgaaacgatattttcagacgcaattaattcaatattatgaacttgccgattttcctcttgcttaattaaatcatagattgccgtatctgtttttgccaacattgacaacacccctcatcttttattgaaagtgcttttgccccgcagatttttcaagtcgattcatgtaggccacaccgacacccaccattgtgaaaccttgaactaaaataattttgacctctggattcagatcaaaataccgtaagccgtcaaaaagatgtcgactagctgaaacaactgaatcacctaacgagaattgatctttgaagcggactgtcgtttgattggttaaaatatcatcgacggccatcaccccgaacggcacattttgctcagtcgcccattgaattgcttcattaaattgggctggttgatcaataatataaacctgcgcattcggtgcgtaatgtttatatttcatgccaggcgcctttggtatctcagaagcacccacttgatgatggtcggccataatggggccaatcacccgttcaatcgcttcttgtgtaacaacgccaggacgtaatataacgggagtcgcaacgcttaagtcaatcacagtcgattctaacccgattcctgtgggcccatcatccaatacgccggcaatcttaccatttaaatcatgtaacacatgatcggccgtggttggacttggtttaccggatgtattcgctgaaggcccgactaaaggcacacccgctgcttgaattaaatccaaagtcacttgattatcaggcattctgaacgcggctgtttttaaaccacccgtcacaaccgacgctaatgcgtttggttttaatggtagaataattgtcaacgagcctggccagaacgtttcaaccaattgtttaaacttaggactcaacgtcgcagcgtaccgtgcaaccgtctcaactgacgcaacatggacaattagcgggttatcacttggtcgaccttttgccgcatacacttttttgactgcttctggattagtggcatccgcgcccaatccgtaaaccgtttcagtcggaaaagcgattaactcaccttgcttgatatcagctgcagctgcggcgatttgtttgactgtgtatcgttttgtttccattatatgccttccttactcgacgtctatctcatcatatcaaattattcgtaaaattgtaactaccacgcatcattctaggccaatttgctaaatcttttttgaattccaacgaaatatccgaactataacttgtaaacagcttttcaatattcggtttttgctgatagccgaattccaaaaataattctgcggttggttcaaagtacggtaacacttctttagcaaagcgttcataaaaatccaaaccatcttgagcagcgaatagtgcaatatctggttcatattctagcacagaggcatccatgactgcccgttctgaatctgcgatatacggcggattcgaaacaatgatgtcaaattgttgaccgttgactggcgctaaaaaatcaccctgttcaaaatgaacaccactctgcaattgttgggcgttctcttgagcaacgtttaaagcgtccgtcgaaatatcgaccgctgtcacttgccaattggggcgttctaacgccaacgtattggcaatcgcccctgaaccggtcccaacgtccaataccttcaacgtttgattgacatcaggatgcgttgtcaaaacccattcgaccaattcttccgtttctggacgtggaatcaaggtcgccggtgtgactttaaattcacgaccgtagaaatcagcataccctaatatatattgcgccggttgatcttgtgcaaaagcctgaatagcggcttgatattgttgccataaaacctcaggcatggcactttgataattcaacaccaattgcgtgtttgaccaatgttgtaacccggataataagaaacgggctgcttcacgttctttatcccgttcttctagaaataaaaaagcccaattcagggctttaagataggtgcgttgtgccatcttgtaattgctccaatttctcagtttggtcaaataggattaacgcatcaatcacatcgcctaattcaccattcataattcggtccaatttattcaaggttaagccaattcgatgatccgtcacccggttttgtggatagttatacgttctaattcgttcggaacggtccccagaacccacggccgatttacgacttgaatcatattcactttggttttctgattcataaaaatcataaacccgtgattttaaaatttgcatggctttcactcggttttgttgttgtgaacgttgatcttgcattgccaccacaatcccagttggtagatgggtcatccgaacggctgatgacgttttattgatatgttgaccaccggcaccagaagcccggtaaacatcggtccgaatatctttcgcttctaattgaacgtcgacaccatcatattcaggcataaccgctaccgtagcggttgacgtgtggacacggccttgtgattccgtcttagggattcgttggacacgatgcgcaccattttcatattttaattttgaataaacattcttaccagtaatcatcatggcaacttctttgaaaccgccgacttcagtggccgtttcatcgataatttcagtttgccaattctgtgattcggcgtaacgttgatacatatttagcaaatcaccggcaaagagactggcttcatcaccaccggctgccccccgaatttccataatgatatttttttcatcattaggatcggttggtaacatcaacagtttgatgccttgttctagtgtttctttttcagtttggagttcacttaaatcagctttagccaattcagtcatttcagcgtcatcagaatcacgtaatagttcttcgctttcttcaatctcgccaaggacttctttcagacgcgtatacttcgcaacgatatcgcgtaagcccgcttcttctttcgacagttccatgtatcgactggtatcactaataacatctggatccgacattaattcttgtaattcagcataacggtctaataaaccgtctagttgttcaaacattttatccattaatggttagccttccttttcaatctgcgttttaacgggtgggttaaaataatgtttccggcaaaccggatagtaagcttcgttcccaccaatttgaatttgttcacccgtgtaaacgggctgaccatcattcatacgcaaattcataattgcctttttacggcagaaccaacagattgtcttcatttcttcaatcttgtcagcaaataacattaagtatcttgaaccttcaaataattcgttgcggaaatcatttttaagaccaaacgccatcacgggaatgttcaagtcatccacgacgtgtgccgcttctaacacgtgatgttgttctagaaattgcgattcatcgattaggacacacgcggcatctggattcgtatctttaaccaattcaaaaatattcgtatccgcaaaaatcggtgttgcttcgcgttttagaccgatgcgactcgacacgatgccgacgccgtctcggttatcaatcccactggttaaaatgatgactgatttatcttgttcctcataattatgcgcgactttcaaaatttcaattgatttgccactattcattgcaccataccgaaaaaataattgcgccaaactcaaacacccctaataagcacattttagtctagtatacctgaaaataagtagcgcaacaatatttgaaagtcataaaaacgactatttatgctcgaaatgacaaaaaaataacccatcctcgattcggataagttattgccaacagcatctggtcactgcggaccgttatttttgatgccattgttgaatcttgctaggctgaaatcccgcccaatattctaataagtcttcgctatcatcatcgataatcttaaccaatggtaattgttgaatctcatatttttctttaagccgttccactttccgttcgctccatgaccgcttttgttcatcgtcgctattgacgtcgattgaattactctcttccgaattaccgtagtaggtattttcgtacgggaaacccaattgatccattaaacgggtcgtcatcttgcattgcggacaatgcggtttcgtataaattactgcgtgaactgccatttgattcctccaacgttaaattaatctgactatttttattatagcaaatttaacaatcactactcaatgatttagataagtaactgattgcttagtcaaatcactgttactcgcacaacaaaggcgtatcctattttccaaaaatatgctatgataattggcattgaaagggtggcttgcatgacaattaaaagttcatttgctaagacgtctggccgtttttcatattggttcttacacacctttatgcaaggcgggagttcattacctggtcagattgcgaccaagattgacccagccgttttaaaagatctaaccaaaaattacgatgtgattattatcactgggacgaatggtaaaacattaacgacggccctaacagttcaaattttgaaacaaaagtaccagaacattatgacgaattcaaccggttcaaacatgatgcaaggcatcacaacagccttcttagcgcatcgccctcaaaaaggccaacgcgacctcgcgattttagaagttgatgaagcgaacgttgaaccgttgtgccggtatattgaacccaaagccatcgtgatgaccaatatcttccgcgatcaaatggatcgttttggtgaaatttatacgacctacaacaaaattctggacggggtcaaactcgttccgaacacaactttaatcatgaacgctgatgtacccctattctcatcagttgaactccctaatccaaaactttattacggcttcaaccatttaccagacggcgaattattagcgcctagcaataccgatggcgttctctgccccatctgcgaacacattattcactacaaatttattacttacagcagtcaaggtaaattctattgcccaaactgcggcttcaaacggcctgaattaatggatcaagtcaccgccattaacgaattacggcccactagctcaagctttgaaatcaatcaagaaccgtttgcgatttcaatcggtggaatgtacaacatttataatgcgctcgcggcctacagcattggtcgtttcctcgatgtggacgtcgccgatattcaagccgcatttacgagtaataaaaaaatatttgggcgtcaagaagtgattcaagttaaagacaaggaagtcactttagtcctcgttaaaaatccggttggcttaaaccaagtcctccaaatgatcgaatctgatcccgaagatttctcattggccatgttgttaaacgccaactatgctgatggcattgataccagttggatctgggacggtgaatttgaatccctcctcaagtctggtattccaacaatcatcacgggtggtgaacggcgtgatgacatcacgttccgtttaaaagtggctggtgtaactgaacaacaattacaagaaaccgccgatttagacgcaactttacgcgccatcgaaaacgcccccactaaacacgtctacgtcctcgccacctatacggccgtcttacaactgcgtaaaaaaatggccgaccataactatatcaagaaagggatgtccgtatgacccaaactttaaaaattgcgcacctctacggtaatttgatgaatacttatggtgatcttggtaatatcctggtccttgattattacgctaaaaagatcggtttacaaaccgaaaccgaggtcatcagtattggtcaagaatttgatgcgagccgttacgacatcgtcctattcggtggtggtcaagacttcgaacaaaagattatctctaaagatttagaatccaaagcaaccgccattaccaactacatcgaaaatggtggcgtcatgttagcgatttgtggtggctatcagctactcggtcactattacatcggtgccgacggttcaaaaatccccggcattggcgcactcgaccattacacgctcagccaagataacagtcgctttatcggcgatatcgtcattcataacgatttatttgatgaaacctatctcggttttgaaaatcataacggccgcacattcctaggcaagcatgaacaacccctcggccgcgtcgaacgcggtcacggtaataacggcgaagatggtaccgaaggttgtgtctacaaaaacacctttggttcatacttccacggcccaatcctaacccataacggggttttggcgaaacgattgctcgcaaccgccatcaccaatcgttatcctgattatgatttaacggcgctaaaagcccttccgattgaagaatcacgttaccaagttgatgccgctggtgttaaattggtccaaaattaagctgtgacagaactcggttatcaattgagtatcaagttaaaaaaacgagtatcctgaattaatattgatagcgatagtttaactctaaaaattcattatggatttccaacagttttcctccaaccagtttagctgcgtttttggtacgcaatctggaccatgagttggtaaggatcgtgaccctcaacaacgccgctacgacccgctattttatgtgggcccccgaccaaccacgtgtgggcaacggctaattgataatcagtggccaattgttggaccggtgttaatcccaccgtcttaatcgttgccaatggttccttagcgatcgcgttaatcccaccatataagagccattgctgatcaacttgttttaattcgtaaaatggaatcgccactttatcgccgattgcataaatcggccgttgaaatttttgcgcttgttgatagatatcttggtcgtctaaacctgaatagttcaaactgatgtagcctgattcaattaattgattgactaacgtcgttaatttttcagtctgctccgcggtcatcgtcaattcagtaggcaataaatcttgttcttcaaaaagacccgttgccggttgaatttgggagatgactttcggtttagcactcaacccgtttaacggatggggtgcattcggatcgccacccaacgccttttcaacgtaaggtgagacgtcaactatcgcattcttgccacggtaatagaaatacagattcatgagggcaaaatagagtaatatcaagaaaacaagtaaatttagaacgccccggccaattgccgccgctctaaaatagtagatgctcttatacaatagataaaaatcgccgagtaaacaaaccaccgaaaaaatgcggttttttacgcgaccgttaatatttaaataaccaaaataatgattaacaatatcaagtaatgataacattgtcgcacacctccttcatgctattgggttgttgtttgtccggtagtcgtttgcgtcgttgtagtatccgtgctgctagaatccgtactacttgcggcatccgccgttgtgtcatcttgcgttgaagaagacgttgaagtcgttacacttgaagtattctcatcttcatccgtcgttgcactactatcactacttgtactgacctcttcagccgaactcgttgactgactgacggattcactagattgactcgattctgaaacggattccgagcttggtttcgattgactactgcttgtgactgatgcactgctacttgaactcgatactttttccgttttaacggactggaccggtttcacggtgttgaccaccacgttggtggcactcatcgcgataatcaacgaaataatggccgctggcggaataatcggcggggtatgataagccataatattttcatcctttcaaaactaattcgtctgacaatcgtcacagagaccgtatagttcaaaacggtggccttcaatctgacaattgggtaattgttcactaaaaaagtcgagtgggcacatcttcaattcgatgactttcccacattgtcgacagataaaatggtgatgatgacgatgttcaaaatcacactggtacttaacgtgggcttgttcaccatgaatctgttgttcaattaggcccagctgttcgaaatctttgatattccgataaatcgtattatgactcattcccggaaaaatcgaccgcatatgctcgtcgatttgagtcactggaatataatgattttcatattcagccaaatattgcaacatttcacggcgttgtttcgtaatcttaaacccattggcttttagaacggctaaagccgtcgtcatctcactcatttgattgattcccttctcaattggtacactagcagaaatcttattttagcatactactatttcaattctgcaactaactgattgcttaagtttaacaaagttttagcaatcacgcatcaagtgtcatcattaccatttattatacccgttctcttctcagatggtttaaaaatagatcaatttaaaacttattagttgcattttaaaaaacttagcgttatgataatgtacaaatgattttatagaaaacggcttcattggtcttctaccagtgtttcattcgtttttcgaagggagactttactatgcaattccaagaacaaactactaattggtaccacgtttcacttgatacacaaacgcaaaaatttatcgcgactagtactgctgacgaatcaatcagtgctagcgggattacaattgaacaagccattcaaaaattagcctttaaagtgaaaccaaccaagcaaaccactaaacaattcgcttagtggtgataataaaaagacgttagtgcaaaacaacctgttttgcgctgacgcctttttattttactttaattgggcaatcagatcggctaatgtttgtttcgtaagcgcccaatcatcattaacaatcactttcgcatgttgattcagttcactaggcaccattagatcccgtttaaactcggcactggccaagcgtttctcaatcgcttccggtgaatcgcgtcgtttttgcaaacgagtcactaacgaatccggtgcagaaaccgtcaagaataacaccatcacttcttgggggaacgtctttaaatacgttttggccccttgggtatcaaccaccaaactaatcaagggcgactgttgccacgctaattctaaagcttcatacgacgagccatattgataaccagaataagttaccgattcgatcaagtgcttggcttgcatcgattccggcgtctcaaaataataatcgacccccgccacttcattatggcgtttcggccgcgtggtatgggtcacgacttgtggaattgcgtaggcttcttttaaatagtgactgaccgttgttttaccgctacccgtcgcaccggtaatgattaataattttttatccattgttaattaaccacactttatctattaaaaaagtttgaccggcaatgtgcccaatcaaactttctaatcgttatttttttagcttacaaacgacgaccaaagtctggtttgtaatattgcattgacatggttgttacgctttgaccaggtgctggtgcgtggacgtatgaaccgccaccgatgtaaatcccaacgtggtaagctgaaccaacgccaccccagaagaccaaatcgcctggttgtaatgctgataatgagacttgtgtgcctaattgactttgagcttgtgatgtccgtggtaagttcatccccgctaatttaccagcgtaataaactaaacctgaacaatcaaaaccaccaggtgctgcgccaccccatgcatatggtgtgccaacaaattgtaacgcgttcccgacaagtgaacccgtattagcagatgatttaggcgcttcagtcgttgctttaggcgcatctttttggatattattagtcgttgttggcgcaaccgttggtgctttggtttcagttgctgtttgagcagcttcaacagcggctttcgtttgagcatctaattgtgtttgtaaggttgctaattgtgtttggtgaccgtcaacttcttcttggaagtcagcttgttgcttttcagcatcagtctttaaagtcaccaattgtgttttatctgattctaaagttgttttagttgtttctaaagtggcttttttagtgacttgttcagtctttaaatcagctaatttcgtttctgaatccgtgacagatgtcatggcttctttattcgcttgatttaacttaccgatcactgaagcgcgaccaatcatgtctgagaaattatcgctattgacgatgaagtcaacgtagatattcccagaaacactgttgccggtttgcttttgcaaagcaacaacttgttcttttaagactgctttacgcgctttaacttcagcttgcgtcttaacgatgtcttggctaatggtcgaaatcttagcgttagtcgctgtaatattagtttgggcgtcatcaattgcaatgactttatcagaaactttgttattaatctcagacactttgttttgtgctgtgtttaatttcgtcaaaagggctgcattttcactgctagcagtgctgattgcagttttggtatctgtcacggtatcggcgctaacggccccaacactgacagctaccgttgcactcattgataatacggctaaagcactaaatactaattgactaacttttttcaccatgtccactccatttaaatttattaacccacttagtttctaagtcggtccccagtctttcaaacagtaattagtgtaccacgtcactattacaaaaatgttacaactaaattactatattaagactaaaggccgatttactttttctgggctaaaagtgattgatactgttgccaatcttgatagctaattaataccgcttgtgctcgatgatttgcatccacaatttcatacgtgatcggtttcaccgccacttctttaatcaattgattaaacatctttttagcgtagcgtgcttgaatttgagtggttgtcattggtttcctccattgttggtttaataagcctgtttaattgtattattgattgaatccctttacaattaacttaatcttttaatacagaaatgaggttattcagatgcaaattacccgtcatgaccaaccaatcgaaaccattggaacgccgccttcaattggtgagcaactccctgatttcaaactggtaacagcacaacacaaaacagtatcgcgcgatgacttaatcggccaattaacgttgattagtattgttcccgacattaacacccgcgtctgcagcattcagaccaaacattttaatacgaccgtcgatcaattcgacgatattcatttttacaccatttcgaccaacacggttgcccaacaacaagactggtgtgccgctgaaggggttcataacatgcaactcctttccgatgaacaactcagcttcggcaaagccatgaacctttatgtcccaagtaataatacattacaacgttcgatcttcatcgtcgatgcgaccggcaagattggttatcaagaattggttgttgaacaaacgcaagaaccagactatcaagcagcgattacctttttagaaaacgctcgttaaacgattgaaaaacgccgtcagggtgtactattccctgacggcgtttcttgcttaccaagcttttttggcgtatgataccactattaatttagacttaaaaaggagtcgccatgactgaactgagtaacgatttgttccaaacttttaataaagtgattcacctgtatcgccattattatggcatgcaattttcgtcacaccatcgttcggtcagtcaaattcgaattcttaaactacttaatcgcgagaacggccaaatgcaagggcaacttgctgacaccttagatattcggccgtcatcactcaccgaatgtttgaagaagttggaggccaaacactatatccaacgtcaatctgaccattacgataaacgaattacccacgttttcatcactaaccaaggccgttcaatcattaaagaagccttagatggtcgcaacgagtttactgagaccctttttagcagtctcacagctgatgaacagcaactactcagtaagctcttaaacaagcttgaaacgaccttagatgacaaacaaaatttcgatttcatggccgaatttacagaacggcttcaccaggccaaattataaaagagtccgaggatcgatgttatgaaacagattgttaaattaagtgtcgttggcctactggcgtggttattcagtaccgtcttcattcaacagattgtgctgccgactttatggcattatccccgcttaacccgggtaatggcccgctttcctgacacaccatttttactgattgcctttttgaccctgaccctttggctgggctggttacaatgggacttgcggcaaccctctgtgatttacggttacctcgtctacagcgtttatttactactcttattcatcgttttgttcaccaaagcgtcgacctaccacgccattagcttagatccgtttgattttctaaggccaaacaagcaaaccttaatcgaggccggtttgaacgtcatctacttcattccgctcggcaccttatacgccattaaggctgatttgaaacagacgattgcgattgcgggcttcacgattttagggattgaaattctgcaatacgccttttatcttggcacgtttgccgttagcgacatcctactcaacggcctaggctgtttgattggtttttaccttgcgacacgtctcaaaaaaagagtcaatataaaaagcagctgaaatttttcagctgctttttttaataaacaatttgattagctttgaatatccaacacttgtaacttcgtttgatgatcttcagttcggcctaaaacgaccggtactaaatcaatcaccaattcaccggtccgggaaatcaccgctcgttctaaatggccgccaaaaacgctcgtatctaaccgggcaaacgtactgtgtagatggaccgcaattttacccgcggcgttttccacattaccatttaaactcaatagttcaacttgctcttgggaccgagtggccacgtactcgtcacgactcggcgaatagatactcactgtcacgtcatcacaagcgccaatacccgaaatcgcgccaaactgatccggaatcgtggctgccagatattttaattcagtgataatttcatcgccgacctctaatcgacaaataatttgctggtctttttgaacagtttgcatctaaaaaagcctccttaagcatggttgtttagtatcatacgacatcgcgccgctaaaaccaatcattatgcttaactaattattatttcccgagaaataataaccaaatgggcatcctttttagatattgataccgtcaaaaaagccctcaagattagctatattgagggcttttttatgcgcggaactaggctaatgctcagttgctaaccgcaactcaacacacttcttttcttaacgtgcttctgagctaacttcttccgtctagctacaactagcaacttatgactaagcccgtcataaattgctagtttaggctatactcagaagttgaccagctcagtcagacacttctttcttaacgtgcttctcgagtagccttttccgattaactacgaaatgggcatcatgagcaaaaaccactcataacacccatttctaggttaatcctcaaagcctgaccgactcgagccagacacttcgatctttaacgtgcttcggcacacagcttcctgtgcttagctacgtttcgcaaacaaagtccatagcccggactttattcacggaactaggctaatgctcagaagctaccgtgcgccccagcaacttctttttttaacgtgcttttgagttgcaacaacttccgcttaacctaaaagtaccaattatcttaaaaaaccaagataactggtacttttctgctaatgctcagttgctaaccgcaactcagcacactcatttatctttaacgtaccaccgttaccgagcatggtgcgtattttgatagataactggcatgcgtgccaatcagatgttttgatggtttcgtttttgaacccacaatcactaaatcaggttggaagctaggaatgatttcttccacaatcacgtgtcccggattgccttcaccgacgaatggtgtgacttcttcgacaccaaattcttgagccttttggacataaatttccaaatcggcggcaatttcagcccgacgatcagcaacgatgttcggtgataatgattgatagatgttcaaatcgccggtttccaaaatactaacaattcccattggaatctgataggccttagccactgtacaagcatagttgaaagcgcgttttgatgacgtcgtatcgtcatcgtcaatcgcgattaataatttttgatagtgcattgattccacttcgatatttaactgacgtttttctgacataacaaacgactcctttatttttcgattaatagggcttctttagtgtgaactaattcggtaatcaattgattgacgggtgttgcaatcccgcgctcagttcccttccgcgcgacatagccgtttaaataatcaatttcagttggccggtgatgttgaattaaatcttgatgcatcgacggataatgatcacccgcttcttctggattaaacaacggcataatgtgcgccaacatctcagccggttgcaaatcgacaccttcagtcgcagcgacggccgaaaattcggcaacaattgcggtcaatagcgtcgtcgcttgactggtctgtcccagttgcgcaatattacaatctagtaaagcgcacagactatttaaagtcccgttaacacacgctttacgccagattgaaaataaaacatccgtactatagtgcgcctttaatccggccgcactcagtaactcgaccaatgctttggccgcattttgactatcaggggccacgttttgtagttcaacgctccccgaaccactcaatgtaatttcaccagggcccgttaatccggctgtccataaagtgattccaacaaaaatattagtcttcggtagataccgttcaatcgtttctggatgccccaatccgtttaatagacaaaccactttggtcttaggtccaattaacggttgaatcgtttgtaacatgttcgttaactgcattgatttcgtaaataaaataatcacatcttgaatctctttaatatccgtcggcaacgctgctggaatctgaacctgcagtggcgcttgccccgcaatattaacggttagtccgttggtgttaatggcttgaacgtgtgctgcccaattatcaagtaacaccaccgaattccccgtcgcttgtaacatatagccaaatcgactgcccatcgcacccgatccagcaattgcaatttttgtcattcgctaataactcccttactcacttgttccctatcatcatgccacactttcaccaaattttcatcagaaaccgcttaaatcgctttttttaatccgccggtctatactggagctaatctcaattagaaagagggggtttcaatgaccaaaataactgattttaccgtcaccgatattgcgggtgaatcctatccgttatcgcgttatcaaggacaagcgctactgattgtcaatacggctagtaaatgtggctttacgccccaatttgccggtttagaagaactttatcaaacctatcgcgatcaagggttcacgattttaggcttcccttgcaatcaattcttgatgcaagatcccggttcagatcagaaaattgcgacattctgccaacaaaactacggggttagtttcccgatgcaccataaaattaaagtcaatggtgcccaacaagatccactgtatcgctatttaatcgacgtttctggtggggctaacattaaatggaatttcactaaatttctgatagatcaaaatgggcagttcgtacaacgcttcgaaccaaaagaaacacctgctagcatcagtccggttctcgagcaactattgaagactgactaacacgaatgctatcggatacaatcaaaaaaacagacgattctcagctgagaatcgtctgtttttttaaaataaaaattgccggtgcgataacacgacttggtgaatcatcaataagaaaatactgtagcctaaactcattagccaggctagacagagatccaaaatgccaatgtgcacgctcgtattaaatagttgggcaatcgtcgaaatcggtggcaataaccctagcatgtagagatacgggtgccaataagtgacaatcgcttcgccacaggtccctaatacaaccatcaataccgttaaaacccccgcaagtcggcgattactcaagacccgtcgttgccaaattaaaccggtggtaatcgcaaccggtacgacactcagcaacattaagaaaccgccgaaccaatcccaccaatttagtgttcgactgaaatagcgcgcgccgtgtagccataaaccgagcgccgaagccccaattcctagaatgacgaagaagacgccgattaaagctaaataacacaatagactttgataaaagcggcgccgttttcttaatttcagactgattactttttccaaaccaatcggcaattgattgatataactgtaggtcaaccaagtcattaacacaaacaggcctaataataagacggcgagactgccaacaaaatcttgtggataagcaacaaagttcacggctaacataatcaaccagaataaaagtggcccccacaagctcccgttgtccattaaaacccgttggtgcaatcttaactgtgcactaaaggacctcatagcgtaaccccctcaaactaaacccatttttaagcatcgcttcaattaatgcatcactttggtgaacgttggcgtaaacaatcacgcgccgagaaccatccgtgattttaagcgctaattgttgcaacgctgctggtaacgctaacgaacgtggcgtcgttgcaaattcaagccgcatcactttttcttccggttgtggtaattcttcgactggcaataagcgcatcgcatccaattcatagatggtcgtcgctaattgttcaatcaaaaaagcgttgttagtccctaagattagcgcgccccctttttggcggtaatcctttaaccaatgaatcatgcgcatctgcgtcggaccatcttgaccggttagcggttcatccatgattaaaatatcaggggtcctcaaaatcgcctgcaagaaattaactttctgcaagtttcctcgtgagagttgttttaaagggacctctaaagaggcagttagcccaaattcataggctaattcggtaatctgttgatccaaataacgattatcaacccgattcatttcacccaataagtgcaaataagtgcgcggggttaagccagttggcgctaattgttccgccatgtagccaactcgcatcttaggtgctaatttcaattggccccgactaatgttggtcagtcccgccaaaacggttagtaacgtggttttacccgcaccattttgtcccgtaatcgcgatacattcttgacgccctatttgtaaatttaatcgtttaaaaagttggcgccgttgatatttttgcgaaaaatcgcgtaactccaagactgcctgcatgtctgtttgccaacctttactattatttagcttgccaattcgcaatattttgtgcggctaatgccaaactcaacacggcatctttagacaagtcagcctgaattaaattatgtttaaccgttgcagccactgcgccaataaccgccaagccgtacgtcaaaacttctaaatcacgtttaaccaaatattgatcttcataaacggcttcgtggctatattcaaaattaactttattgtcggctaaaataccatcgacatgggtcaccataatccgatcagtgacgtcgattaataatttacgatcgtctgacaaggttaatttatgatctgattctgattgatagtaagtttcttcggtaatggctaaatatttagcgaccggattatttaaaacagcaaagctatccaatacggcaaaaatttcagttggtttaatcattacttttcgttctaaaattgcggtcatgtttgcttcaagccaatctgctaattggcgaacattatcttgtaccatggttgcaccccttttattatctttaaatattcttaatatatacttaccataatacaccatcgacaaatgaagcaaaagccggagttactgttaatccgcttgcggatgatcatcgattaaaccggcaccctgtaaataggcgtaaatgatgaccggtccaacaaactgacaaccccgtttctttaaatcgcgcgcgacttggatcgacaatggagattgcgctggtaccgccgcccaagtcgccgggtgattaacaattggttggtcatccacaaactgccatagatacttagcaaactgaccaaattcacgttgaatggctaaaacaacctgcgcgttattaatcgtcgccgttaatttccgtcgattgcgaatcaaatccgggttcaacatgagttggtcgatatcggcgttcgtcattgccgcgactttagcaatttcaaattgatgaaatgcttgacgaaaagcaggacgtttggcgaggactgttcgccaactcaaccccgcttgataagtctctaaacacaacaattcaaataaccgttgatcatcgtgctctgggcgcccccattcagtttgataataggctaatagtgctggtgtttcgttcatccaattggcatttgtcattttaatcactccttcagtttcaatatacgataacaaaaaagaatgccactaaaataaccaccaaaaattaattttagtggttattttagcgacgcttatatttaatgattattttttctgacctttaatttgagtttgattatcaacatccgtctttacgattaagacgtcacaaaccgcattccggttaacgtattccgttacagaacccatcaacatccgttcaacggcgttcaagccagtcgaacccatcataattaaatcggtttgatgatcattaggaaaatcacgggcaatcacgtttttgggactaccaaaacgaacgtgaatttcaacatcctctaaatgttccttattctgaatatcgtacttcaagctatttaaataattctgagcgtcttctgaaatttggaaaatggcatctccagaaagcatcccactgtaactaccagcgaattgttttgtatctaaaacgttcaaaacatctaaatgagcgttattcattttagcgacacgaaccgccttattcaaagctaattcagcttcttctgaaccatcaacggggactaatatcttcttatattcttgaaccatgattctcatctcgctttctcaatctcaatttgcacattgttactaacttaagaatataccgctaccgcggacaattcaagcaaaaaggtaagggcttttacaaaatggttaatcactagaaatagtattgaggaaacaaaggcgatagttcggactttattcacggaactaggctaatacgcagaagttgaccagctcagtcagcacttccttagaaatagtctttcttttttagccaccaacccgctagtaggctgatgattagggttaggcctaataatagtaggaagcctttgccgctgtggctgagtggcactgggacgttcattccccagaagccgccaatcatcgttggaatcgttaaaataattgacaacgaggtcaaggttttcatgatgttattcaaacgatttgaaataatatccgataataaatcacttaattgagccaataattcccgataagtcgtgacggccttatccgatttggcaaattgaatatcaattcgatacagttcgtcagcttgattggcgactaattcaaataagcgggttgctttaatttgcggcataatttgttgattactttttaagcctaaatcgaggaagaccacacttttacgcaacgtttttaacgcgtacaatgtttgattgcgcgtcgaaacgtgaacgtttttttcaagttgttgaatttgttgcgcgacaatatccaacgctgataaataacgttgataaattaacgaaatactgcgtaagaccatcgtttctaatggttgttgttcgattaacaactggcgcatctgatcaactaacgccgactgttggtggccgaccgtcatcaaaatatgctcactaataataaacgaaaatggtcgcgtaatgaactccgcgtgttcttccgtatcctgcattttaaccgggaccaataaacaaacatgggtcaattgttcaccggcttcggtcgtaaacgtttcatagcgcgccacttcattgatatcttgggcaacttcaaaaagcgtgactggtaaatgatattttttagcaaaatgtaacatttcgtgcttgctcggatcttcaaaatgaatccaattggcctgcttttcagaagcgctgacttgaatcggttgacccggtataatctcaaaatatgataacatgttatccactccgttctcactatttattatcatactgtgcatcgacaactaataacaagtctcaaccgttaaattaattaatatgctacaatatcagtagtttaaaacgggagggttatctgatgcaaaatcgaattttaccactacaacaagggcgtaattttagggaattaggcggctaccaaacgacagacggtcacacacttaaatggcacaaattaattcgttcagcaactttggcgaacttaaaccaatctgatttggactatctagccgattacgggcttcaatacgatgtcgattttcgatccgttgatgaaaaaacggctgcaccagatcgcttaccacaacaaaccacttatgaattgttacccgtctttgcggttgatgaaacggccaattccgctagtgaagaagagatgtatcagttattcagccaagatgcgactactgggtatcaacggatggttaaagtctacgataatctcatcaatcaagaacgctctaaagcggcctaccgccgcttcttcgaattattattagccaatgatcaagacaatagtagtctcctttttcattgttccgccggtaaagatcgcactggtatgggcgcagccttcttactgagcgcactcggcgttcccgaaaccacgattcaagctgactatctcttaacgaatcaagcttctgccaattacattcaagaatatttaaacgacttgaaacaaaagacaagtgaccccgcaatcatccaaagcgtccatgcgctactgacggtcgatttagattatttaaacaccgctaaaaaagcaattcaagcgcaaaccggtagcgttcagaattatttaaagaccgatttaaaattaaccgatcacgatttggcggacttgcgtcaaatttatttaaactaatcagttccacgtgaaacgtgattttttgaaaggaattaatgtcgtccatgccaacccttaaagaacaagtcatcgcagccagccaatcgattggaattaacaagattgggtttaccactgcggccccctttgattacttagaagccagcttaaaagaacaacagcaaaatgaccattcgagtggcttcgaacacaaaattttagaagaacgtctttatcccgaattgattttcgaccaaccaaaatcaattatcgccattgccctcgcctatccgacgaaaatggcaaataaaccggcccgaacaggtgctaaacgcggcagctttgcacgcgcttcttggggcattgattatcacgatatcttgcgtgataaaatggcgcaattaatcgacgcgatcaaagacctagcagctgacgatgccgaggtgacgtttaagccaatggtcgacactggcgaactgagcgatgtggccgttgcacaacgcgccggtttagggttcatcggtttgaacggtttattgattacccctgaattcggttcatacgtttatctaggtgaaattatcaccaacattccgttcgaacccgacgttccgatgagtaatcaatgtggcagttgtacgcgctgtatcgattactgtccaccatccgcattgatgggcgatggccgtttgaacgccaaacgttgcttgtcttatcagacgcagactaaaggtttcatgccggaagaatatcggcctaaaattcgaagcgtgatttatggctgcgatatttgccaacaggtttgtccgtttaataaaggtaaagactttcatttccatcctgacatggaacccgatccagaatcggtcatgccagaactccaaccgctcctaacgattggtaataaagaattcaaagttaaatttggacacctagccggttcatggcgcggtaaaaaaccgttgcaacgaaacgccatcatcgcgttagccaacgttaaagaccgttcggctgtgccccaacttttacaattgattgacaccgacccacggcccgtcattcgcgggaccgccgcttgggcgattgcccaactgactcgcgatgtgacgcccgagttaatcacttttatgcaacaagccgaagcgcaggaaatagatcctgaagcccaaggcgaatttcaaaacgctttactcaaattaaatgaacaactatctgaaaattagaccaaaaagcggcggaaatcctgagatttccgccgcttttttaggttgtttaagtgaaagcttttttgggcactgaagaataatcgcgaatcatacaaactacccaaaatgcaagccaatagtaaacactcggctggctcgttaataaaagaacagctaagaaaatccccaaacccgcaattagctttccgctgattgtcggctgccaattccgcgaattataacttggatagtgccgataaaaaacgagctggataactataagataaacaattgtcaccaaaactgagagtccgaaagcgaccgtatagaacggcttattcggattcgtcacttgaccgattaacgtcccaatcattagaaaaataaagacaacattgttgatcaatgcatattttaagttaagcatttttagtttggtcattatcagtcctccaccatcttttgaactgagaagtagtcgcgtaataaaccaataatgaacgccgtaccacaaattaagacaaagtaacgttcaaaatcaaatagcaatctaatcacaaccagcgtgccaatgataatgacaccccaactgatttttgaccgttgccagtttcgcggattgtaaatgggatatttgcgataaatgactttcgataacagccatagataaccgatcattagtgcgattaaagtgcctgcttcaaaccagtaaaattgattactcaagcttgaagactggcgcccaaaggcaatcagtagcagtaacaagcaataattaacattattgattaacgcatattttaaatgagtcatcgattatctcgccgccattccttgagccaactcagcattaataagaacaccatgaaaccgattattcccaaccaatcagtgtagagacccctgattagcgcgccaatgattaacaccgcgctaagtattaagagccccttaaaatgaatcataatccaatccagtagcgcatcaatgatactagtcatcggaatcaccgccttcactaaaccattttcttatcttgattatactaccattgaccatcgccgtatatatttggtataccaattccaattattcggttggttcgtttaataatctctcgataattagtcccgctaccaacaatgtcattaatagtattaatttatccgaattattcgataaattcagttgttgcactaataagatatttaacccgaacccaccaatcaagataaatgcccgttttattaatcgttttgtcaccacccaactagcccccattaatacactttatgccctgtctttcattatgcagaagttcattaaacttaaatagcaagtaatgcttacctagggggaagtgatgctttccccctaggtcgattaagtccatctttttatttcccgggaattattagttcctaaaaaataaacggctgccacaattaattcgatcttgtttagtcattcagaattactcagtgtttttaatttactttttgactagcgttagttgtaagccttatccattgacacttgctcattagctccttaatatgaatattatcaatagattaatattaagacatctttttaggaggttactgatggcccattatctagaatttgaccatgtttctaaaatttatcgcggtggcaataaagccgttgatgatattagcttttcggttgatcagggtgaatttatctgcctgattgggacctctggttccggtaaaacaaccacgatgcgtatgattaaccgcatgattaatccaacgcacgggacaattacactcgacggtcattcactagccgatactgatccggttaaacttcggcgccagattggctacgtgattcaaaacatcggattaatgccccacatgacgattcgcgataacatcacaatcgtccctaaattattaaaatggccggaagacaaacgcgaacaaaaagccaaagaactattgaaactcgtcgagctgcccgaagattttttagaccgctatccgagtcaattatcggggggccaacaacaacggataggtgtcatccgcgctttagcggccggccaagatattattctaatggatgaaccgtttggggcattggatccgattacccgtgaagccctacaagaccttgtgaaacaactccaaactaaaatgggcaaaacgattatcttcgtgacccacgacatggacgaagcgttgaatctgtcttcgcggattgcgattatggaccacggcaaaattattcaattcgataccccggctgaaattttacggcatcccgccaatgatttcgttaaaaatctaattggccacgatcgtttactagaagctaaaccggacgttgaaaccgttggtcaaattatgttgaccacgccggtcacgattacgcccgataaatcactggaaacggcgattaaattgatgcgtgagcgccgggttgataccttactagtcgttgatgaagaccagcacctgaagggcttggtcgatttagaaaatattgaccatcattatcgtgatgcgaccgccgttagcgatattatgttgaccaaaattaattacgttaaccaaaccgatctcgtccgcgacaccatcgagcgtattttaaaacgcggctggaaatacgtgcccgtcgttgatgatcaacaacacttagtcggcattgtcactcggacagccttggtggacgttgtctacgatgctgtttggggcgaaatagctgattaaaggaggtcattcttatgcttaattttctcaatcaaaatggggctgaattgctgattaaaacttgggaacaactctatatttcagccattgctttatgtttaggtgcgctggtcgccgttccactaggtatcggcctaacccgttttccaaagactgctaaagtcgtgattgccatcgccagtatgctccaaacagtcccatcattagcgttattagcgctgatgattccactattcgggattggtaaagtccccgcgattatcgcgctattcatctattcactattgccgattttgcgcaatacctacatcggcatgaacgatgttgatcccgttttaaaagatagtgctaaaggtatgggtatgacccctttgcaatccatcctacaagttgaagttccaatggcgaccccagtcattatggccggtattcgtctatcggccgtttacgtgattgcttgggcgacactagcatcttacattggcgctggtggtttaggtgatttcatcttcaacggcttgaatctcttcaaacccgatttaattatcggcgggacgattcccgttacccttttagcattaatcgttgatttcttactcggccggcttgaaaaaaagctgacgccagtggctatcagataggaggtcgctatgtctcatattcgtaaactaatgacaaccataacactgctcgccagctgcctcttactcttgagtagctgcagttttccagggctaggcggttccgctaaagatacgattcggattagttcgcaaagcacgactgaatcgcaaatcttggccaatatcgttagccaattaatcgcccacgaaacggataatcaggtcgaactcgtcaacaacttgggttcttcgaccgtcacgcatgaatccttgattcgcggtgacgccgacatctccgctagtcggtatgccgggaccgaaatgaccgggaccttaaaattatccccaactaaggactccgccaaagcacaacaaattgttaaaactgaatttaagaatcgttaccaacaaacttggttcccgacttacggtttcgcggatacttacgcgttcatggtgactcaagccaccgctaagaaataccatcttgaaaccgtcagtgatctcggccgggttgccaaccagttaaccgctggcgttgattccgtttgggtcaaccacgaaggtgatggttatcgcgaatttaaacaaacttacaactacgatttcaagaaagtcgcaccaatgcaaatcggtttagtttacagcgctctagctgccggtaaaatggacgttgttttagggtattcaactgatggccgaattaaaagttacgacctaaaagtgctcaaagacgatcgccaatttttcccaccctacgatgctagtttggtcgccactgatcaaattctaaaggcgcatcccgaactaaaaccgttattgaaccggttatccggtcaaattgatttagcaacgatgcaatcgctcaactaccaagtcgataacgatttattggaaccgtccgtcgtcgccaaacaattcctgcaaaaacacgattactttcagaaaggagccgccaaatgaccaatctgaacacttggcaacaactcatttattattttgaacataacggtctttacgtcctcagccagtttaaccgtcatttcttgatttcaatttacggcgtcttactcgcggcgattatcggcattcccctcgggattctgattgcgcaccgtaaacggctaagtgatgttataattggggtagcgaatgtgattcaaaccgtcccatcgttagccatgctgtcaatcatcatgctggccatggggctgggcactaacaccgtcattatgaccgtgttattatattctttactgcccatcatcaagaacacctacaccggcatgattaacgtctcagaaacgattttagactccggtcgtggcatgggcatgaccaaatggcaactgctaaccatggtcgaactgccactctccttatcggtcattatggctggtattcgaaacgcattagtcgtggcgatcgggattacggcgattggcgccttcgtcggtgctggcggacttggtgatatcattattcgcggtaccaacgcgactgacggtggcgccctaatcttagcgggtgctttaccaacggctttgatggcgataatcgccgatttagtcttaggttttatccaacaccgtctcgaagcgccacaagcacgtctttaatttaggaaggtgattttatgaaactctaccaagcgctcacgcaagtcacgctaaataaccaaatggtcgatgatttaccagacttcgcaattaaagccattcttgaaaaaccattaacgttctcaccatcgacgttataccactacatcgataccgtcttaaaaagcggttcacaccatgatgaaaataacttgaaattcgtcacagacgcgatttatatcacggaaaatttcaactttaaagcgactgatttcgaacaatacgcccaaagcttcgaggaacgggtgaccctcgcccgccaaatcgtggccgatttaaatcggcacgtttccgtcaatctcgatttaaacaaacatgaattccaacttgtttttgtcgattaaaccaatcgccaccaagaagtcaatcctaggtcattggattgactttttaattgctgttaaaggagtccttacccgtgccaaacgcacaacgtcaaaatagcgccctctataaactgaatctcacgacttatcaattaaccaatgaacaatcgcaattaaaaacgcagattcgccaattttgtgaagcgcatatcactgatcaacacgccacatttttaatccaaggggcggccggtactggcaaaagtgtgattctcagtagtgtcttcgctgaactacaaacactcgcccgccagacaccggattcaccactctttcacaccgataaccgcctattggtcaaccatccagaaatgttgaaactctatcaacaaggcactgccgattcagcggtgctcttcaaaaaagactttcaacggccgacaaccttcattaaccaagcgcttaaaactgagacagttgctgatattgtcttagtcgatgaagctcatttattattgacccgcagtgatccttacaatcatttcaatcaaaccaatcaactggatgaaattatcaatcatagccgaattaccattctgattttcgatgaacaacaagtgctaaaggtcaaaagtttctggtcagatcagcagctacaacaacacttactagccggcccgacccaaaccgcacaattgacccatcaatttagaatgcagaccgatttagccgtcaccgattggattagtgcgttacacaatcgacacctccaaccactccccaaccccaccgactttgattttcgcatttttgcggacgccaacgaactgtaccaccagattcggtttagaaatcagaccagcggactcgctcggatgttagcgacctatgatttcccggccactttgaatgacggccatgaccatttcgtttcaacaccgactttcaaactgcgctgggatcgttatcaaccaaccgccaaaacttattgggcagaacgcgaagatagtctggatgaagtcggttcggtttatacgattcaaggttttgatttgaactatgccggggtcatcttaggcccttcggttggttacgacgcgcaaaccgatcgactaattattcggcctgagtattacgaagatcaagccgcctttgcgggtgcgacgaaattaccccatcccaaccaagcaaaatgccagattatcttaaatagtatttacgtcctattaagtcgggcacgcaacggtttatacctgtacgctgtcgaccccgcattacaaaatcgacttttaacgttacaatcttcagaatttcctgggaaataatcgtgagttcaatcactttccaataataagtgaaacagttaaactattagaagtaatcaattcattcaaaaggagtctttctcatgacacacttaacagatacttataccttgaacaacggcctgacaatccccaagcttggttttggcacttggcaaaccccagatggcgcaactgccgttcaggccgttaaagacgcgctgacgaccggctatcgacatatcgatacggcccaagcttacggcaatgaagccagcgtcggtcaagccatccaagaaagtggcgttgcgcgttcagatctatttctgaccacaaaaatttggaatgctaatcacagctatgaactagtcatgagctcatttgcagaatcacttcaaaaactacaaacggactatgtcgacttactattgattcactggcccaatccaattgacttccgtgacaactggcaagctgcgaatgccgaaacttggcgggcgatggaaacactttatcgcgccggcaaagccaaagccatcggggtcagcaacttccaaccgcaacacttagaagaactcgccaaaacggctgaaattcaaccgatggtcaatcaaattttcttagcacctggtgaattacaacccgccgtagtcagctactcacaagaccacaacatgctacttgaagcttacagcccccttggtaccggtaaaatcttcaaagtttctgccatgcaacaattagctgacaaatatggccgttcaattccacaaattgcactccgttggtccttacaacacggcttcttaccactccccaaatcggtgcatgctgaatacattcaacaaaacaccgaagtcttcgatttcgaattaaccaacgaagacatggccttaattgacgcattagacggcgtcgtcgggaaggctcaagatccagatgtagccactttctaagagtgctttgagtgatgaataacaactgagcattaacaaaaaataccaattatcttgatttgaagataattggtattttaggttaagcggaagttgttctcacccaaatgcacgtttcaaaataagtaagggctggatcagccgattaacgtctaaaaatcgccagccagaaccgatgacctaaaaccccgttttcttgccaaactcgtctaacgcattaaccacctaggttatttagtttagatatttaacaatttggtttacctaacctttgaattatggtattttcattatgacacgttataaaatcagacttatggccgacgttatttaccgttgagagtctgaaaatggtagaatagaattagttattaaagaaatggggaattatattgtcaagtggtcagatattttccaatctgttcattatgctcgtcaccttcttttttgccgccttcttcgtggccgccgaatttgcactcgttcaaactcggcctagtgccctagaagacgccattaattcaggtaacggcagtcctaaaaaattaggtctcgcccttaaaatgactcaaaacttgaatgagtatttatcaaccactcaagttggggtcagtgttgccgggattattttaggttggattggtgaatcaacggttgaaaccattctggttgatttattagggttaacgcatttagtctcgaacggtagcctgcacatcattggcgcaatcgccggggtcttagttttaacttatttagaagtggttttcactgaaattgtgcctaagaatatcagtatcgatattccaatggaaatgttgatggccgttgcacgaccgcttcattactgtcacctgctgttttatcccttcgtctggttactcaacatctctgcaaccggcgttgtgaagttaatcggttttgcacccgccgatgaaggtggcgatgtcctttctcaagccgaaattattagtctctctaaaaatgccgtgaccggtggcgaattagatcgcaacgatttagtttatatgcaacgggccttcgattttaacgatcggatcgccaaagacgtgatggtcgatcggaccagtctgtatgtcgttgatatcaccgacacggttaaagatgttttaaaagattatttacaacaaggtttcagtcgcttcccagtcgttgctgaaaatgataaggataagattctcggttacgtgtacgcttacgatttagtgcgccaatcacaggtcgatgattcaatccgcgttagcaaattgctccgttcaatcatttcagtgcccgaagccacaccaattcacagtttattaaatcaaatgattaagaaacaaaccccaatcgtcgtcgtcgttgatgaatacggtgggacgagtgggattgtcactgataaagatatttacgaagaattattcgggacggttaaagatgaaattgatgatgtttccgatgaatacatcatcaaagaaggcgacaatcattaccgcgttagtggtaaaacaaccttgtatgattttgaccgtttctttaagactaaaatcgacacgtttgaagcttcagatagcgtcaccgttgccggttacgttttagaaaattttgatcatctgcaacaggataaggtgattcaagttgaccaatttgatttaaaagtcgctgaattcaaccgcggctacatcgattggtttgaagtcacaccacgaccagttgaacttgacgactcatcagaaacaactgactaatcacacaacaaaaaacggcatcaccactattaatggtgacgccattttttgtttgtactaaatggttaaataatctcgactccagataacgcccataactttttcaccggtatgcacgccgaccaccggaccgatatgactggcttcaaccggaatttcggggaactcggcctgcaaagtcgccacccattcggcactttcttccggattattgccatcgacaacgcacgcccgaattggataatccacgtcagcaatcgctgctttgaaatccgccaatactttttggaaagcccgttttttagtccgttccttggtcaacgccacgatctggccctggtcattaaaactgagaatcggtttaatccgcaacagattaccgacaaacgcggcactgtttgaaatccgtcccgtccgcaataaatgacttaaatcgtcgacaacaaaataaacgccaaccgtctggcgcatcgcttctaatttagggataattgttgcggcgtgttcgccttgcgctactaatcgagctgcggttaagactaagtaagcttcgcccgcgctcgtgactttagaatcgaacgggtagattttaagcccctcaatcgtttgcgaataggcctgtaaattattgataaaactcgtaatcccactggaaaggtggatacaaatcacttcatcaaaaccctggtcaatcaattggtcaaacacctgttgcatttggcccatcgtaatctgtgaagtcgttggtaatttatccgtttcacgcatcttggtataaaattcttctgcagtaatttcaatattttctaaataaacttgttggtcaaaaataacggtaatcggcaccacaatcacgtgattcgccttggcaaccgctggctctaaataagcagcactatctgtaacaatcgctgtcttcatgtcatactccttcatggcacaccacttttggttattatcccaccttacaaccaaaataacaaacttgacttatctcgtcattttcgcccacctaaaaagccacactcatcttgaatctacgacgagtgtggcttatgttcaattaaagcaaatttatttagcgagtgctgcaggatctaaaacgacgatttgaacgcgatcatctactgccccaccgttattctttaaagcgagaatttgatttctagggtttaatgataagacttcatggccgtcaaaataagtgtctgaatagcctttataatagacagggcctaattctgaatcgaaatgggcttgataatccttcaattcaatattctcaggcacgattaataagcggaagttcgtgtctaaagtgcaataaccaacctttgaaagttcaccgaccccatcatctaaatccaacaataatttttggtctgctgtcaattgcttttgaatcttttgcaaagcttctggttcaatctttaataacattgcaatcatccctttcaactactcagtttacaccaatttagattttacacaatctatctgctcatcagtttgcgttttattgaacaatcaattgttatctacctcacaaaagacgataggtaattgataccgtgcttttgagttgcaacaacctccgcttaaccaaaaatccgccaattatcttaaactcaagataactggcggatttttggttaatgctcagctgctacccgcaactcaacacacttacttcattaacctctttgtgggattaatttggcgagtaaccaaacaacggcaccagccactaaaccaatcagactgaattgactggccacggctaaaacgcctaacccgtaattcgtcacaatttggctgaagttgccagcccgttgcgcgacttctgcaatcaagccactatatttaacgattgctgttagtaaccatagtaataaaccagcccaagcaaaagcggcccctagactcccaaagacaatcttaaaatgctgactaatcgcaaattggactaaaattaagacaattcccataataatcgcaacccacatcatgattgaaaccaccattttgaccgtcttcatttcagaggctagtgtcgttaaataaggcgtttgaatttcagtctctaaatacgttttgacaggggcttgaactgcagcgacagccgtcgtcaccaacgatttcagtaaaccactacctggaatcgctgtcgttaaatgacccgccatttggctaatcacttgatcggtatctagcggattagccttgccggcgtagatattcgtaacggtcgtttttaaatccgtttgaacgttactttcagttaacattttaacttgaacactctgcggtaacccgtttttttgcgcggcatccaacaacatcacgttgatttcattggtgacggtcgtcaatgtctctggcttttgaagttgttcttgcgtgaacgattctttcaagacggtttgattcaaaatcaggccaccaaccccaaagaaaacacataggaagattaaaaaggttaagccgcgactcagaccgcgattggggcgtttaaccgtttgtgctgcttgtactcgactaattggttccattataaacatcctttctatcgtggtgcattcaaaacaataacactatgatttagctaaattaaatgctaaagtgaagttattcagactaactggaggactttcaaattatgacgaatctatcgattttatatatttcaatcgctggtaatacccgctcatttgtcaacgacttacaagaatacgctactgagcaacaccagattaatccggcgcgtccaacgattacattaaccgaaatctcagatgccacacccctcaaagccgaaacggaccctttttacgcctttgtcccaacttatttggacggcggcaacggtatcgataacggtgttaaagaattaatgaccaacagtctcggcgaatacatcgactacgctgataatgccagcttatgtcgtggcgttgtcgggagtggcaatcgtaatttcaacgaacaatattgtctgaccgctaaacggtatggccaacagtttgaagccccattcttagctgactatgagcttcgtggcacgtctaaagacgtcgcgcgagtctatacattactggtcgctaatttacatcagagccattaaaactgcaaggctttcggtaaaacggtcactaaatcagtcggttgcgcgacaattgctagcgcaccggcttttttgagttccgcggtgctgccgtaaccgtaactgactccgacggctggtatttggttagcttttgcgcctaaaatatcattttggcgatcgccgaccatcactaaggattccgattgggccgataagcccattgtattgagcgcataagtaatcacgtccgcttttttaacccgggtcgtttcatcgacacttgctccataaacaccactaaaatacggtgtcagttcaagatgggcaatgatttttttcgcaaacggttccggtttcgacgttgcgattgcgagttgataatcctgcgcttgcaaatcagccaaagtttgaatcatccccggataaagttcgttttggtataagccggttggttcataataagcttggaaagttttgattgcgtgttgcgtcgccacttcatccaacccaaaagtcgccataatcgtttcgtttaacggtggaccgatgaacttcaataacgcagccgtcgtttgtgttggcaacgctaattcttcaatcatgtattccaaagaattcaaaataccggtttgcgaatccgcaatggtaccgtctaaatcaaataaaatggtgccttttgtcatcataccaacctcattttctttatgcagtaaccctattctagcacattctagaatccttaaactttccttatcctttttttcataaatctataaagttctgttcacacaatcttcacaaattcccattatagtaatgagtatagaaaagcgatacttttctatttcatactacttaactttttcattttactcctccaaagtaaaataacggtgaggtcaaacttaccgcacaggctgttcccccaaaacagacctgtgaaacccttactcctttttagatcttcggatctacaaaaaagtcggtccccccaagaccggcttttttgttgcatatttttgtgtcaaccgctttcatttatgctaaaataagttattcattacttaagggagttgacattatgtgtacgagcttaacctattccaccgttgatgggcaccattttttggccagaaccatggatttttcattagaattagacgccaatccactatttttaccccaccattttaaatggtatccgattttatctcaaccggcccaaattaccaagtacgccattatgggggccggtggtcaatttagtccgactcaatacttagtcgctgacggttttaatgagcacggtttagcctgcgccgaactctttttcgccggggctgccgtctacgaaccgaatcaaatagctggtaaattaaatttagttgctgaagaatttaccacttgggccctaggttatcaccaaaatctagcggatctcgcgcaagatttagccaatgttgtcatcattgatagcgatcaaggcgaattaaaagccaatcaaccgctacactggatttttaccgacaaaacgggcgagaccatgattattgaacctgaaggtcacggtctgcacttaatcaacgatcccgttggtgtcatgaccaatacgcccaatctagattggcacttaaaaaatttgaataattatttaaatctacaaccgatgccgtttcccgaacgacaatattcacactataccgcacacgtttttagccaagggactggtactcaagcactccccggcggttacacaccaccacaacgctttgttcgggcggcttatagccgacaaacgatgccacaggcgcaaactgccgcagatggcgtcaatgccctattgcatatgctagacaacgtgacgattcccaaaggcgctaatttagagtcggacggtcagaccgattacacgcaataccaaggcatcctgagccttgatgaacgggcctactatttcgtcaattacacgaatcggacggtttatcggacaacgatgacagacgaactcattcaacaacaaactacaccagtcatctaccccgctcaaagtcagcaacaatcagtcccactaaattaaaaacaaacggcacaatcccaattgagattgtgccgtttgtttttatttatagatatttttgcatcattttaacggtatccagttgggcttgatctgagactttatgttgtccctgatcttccgtcgttaagctgacgttagccgtcgctggatcagttgcgaccaatgattcaacaaactgggccgtgaactgataaggcaccattggatcagccgttccgtgataaaaatgcaacggtcgaccggctaattgggctgaattcaacgataaatcgtacgccgctaactgcgttaatgtcgtttgaatcgcctcttgatacttatcttgcaagatttctggtaattgtgcgacttgccatttcgcaaaggcaactggcattggggcaccaattttgtcgacgccgactttgacgttaggatactgggtcataatcgcatccgtcgtgattccgcccattgatgtcccagtaaccccaattttttgcggatcgactaacccttcagcggttaattgctcgaccagctgaccaaattcagtgaccgattgcatcacgatttgccaaaattcgagcatcaactctgaaaataactggtgaccgtggcgttgaccatgatatttcgcatctggtaagaccacccgaaaaccagctttggctaagaagttcgccaacattaattcagattctttacgatgcgtccaaccatggtaaacaaagacggtcggtaatcgcgtttgttcttgaccactgggggccacgattaaagtactaaccgcgccaaattggcgttcttgaatggtaatcattttaagacccctttctcattcattattgcctgggaaatactaaccgaagaatgtcccagaaatcttaaagcgccgtttgagataaatccgaacaccgattaagagtgctgcaatgacgatttgaacgattgctggtacgaccggattcaagactgctggaattaagattgtcacgccgtaagctgcaacgaataacaacgttaatccaacgacaattaatgccatcttccagaatggtggtcgttgatctttaggcatttgcgtgtaacgcattggataagtcataatcacgccggctaataccgctgtaatcacgattgacgtaatcccaataccagttgctttgcccttcgcaaagtacgcactaattccgttaatcgccaaatacataattaggaaaatcaacccattatctagcatttgtaattgaattgatgttttaacgggtgctttaggcgcgtgcaataaactattaattttaaccgtcactgaaccgtataattggttagcgggttggcctttatgttgcgccgtcaacatttcaggtaacatttcggttaacatcgccgtttgttgttcctctgaaatgccttccgcctgcaatgcccgtttaaatttaaataaataatccgcatttttattacttaacttcgctgataatgcctcgatatcgaccgttggcacttcaggtgcttgttgtgctgcttcttttgtcaactgactttcctcctcgattaaacgttaaatctaaattcaataatgtcgccgtcttgaacgtcgtattctttaccttctgagcgcaagcgacccgcttctttaacggcttgcattgaaccatattgatctaaatcagcaaaggcgaccgtttcagcccggataaagccgcgttcaaaatcagaatgaatcacaccggctgtttgtggcgccttcatgccttgtttaaaggtccaagcacgcgtttctttgccaccagccgtgaagaacgttgctaaccctaatagatgataagccgcgcgaatcaacttgtctaagccgggttcagtgacgccttcagcttctaaaaattcagccttatcagcatcatctaatgacgcaatttcttcttcggtgcgagcagaaatcgcaatcacttcagcgccttccttagctgcgaattcccggatttgttgcacataatcgacactatcagggtcggccatgtcttcttcggcaatattagcaacgtataaaacgggtttagaggtcaataagaagaatcctttgaccattttagcttcatcttcgttgaagtcgattgaacggactgaaccgccttcttctaaaacgggtttaattttcttcaaaacgtcaaattcagctaacgcttctttatctttagtccgcgcaaccttttcaactcgtgcgtaacgctttgtcacgctctctaagtccgccaaactcaattcgaggttaatcgtatcaatatcatctaacggatcaacagtacccgttacagacgtaatattgtcatcatcaaacgcgcgcaccacgtggacaatcgcatcgacttgacgaatattttctaagaacttattgcctaaaccttcacccttactagcgcctttaacaatcccggcaatatccgtaaattcaaaagttgtggggataattttcttagctggcacaatttcttgaatccgcgccaaccgtttgtctgggacttccaccatgccgacgtttggatcaatcgtggcaaatgggtagttggccatttcggcacccgctttagtaatcgcgttaaataacgttgattttccgacgttgggtaacccaacaattcctgcagttaatgacatattttctgacactttcctttactctaaaaatttgtttggttcggaccttgttgcatgacttgataatggggttcggtgctttgttcgaccgtttcagccgtcgttaacacctttttaagtttcttatcaaattcacgtcgcggtaataggacggcatgcccgcaccccatacatttaatccggatatccatgccgagacgcacgacttcaaaccgattcgtgccgcaagcgtgttgtttcttcatttggactaaatcacctaattgatacatgtgcatactccaatctaatcaatattgacatctagcaacgataaaattcggttcaaatcgtcgaccgtttgataatcaatttcaattttgccccggcctttgctattaatcgcaatgttgaccttggcatcaaatttatcgactagttgattttcactcgcttgaatatacggtgatttaatcttggttttggtaactttcgtcgctttagtttggttcatttggttgaccaactgttcgagttgccgaactgttaagccttccgtaatcgtccgtttggctaaggcgctaatttgcgttttcttctttaacgccaataacgtccgcgcttggcccatcgacaaatcgccattttgcaaaagctgtttgacgtcggcgggtaggcctagcaatcgtaagtaattagcgatgtagggccgactcttgcccagtcgttctgacacttcagcttgcgttaagttaagttttttaagtaacgtttcgtacgcttgggcttcttccaacggtgatagatcttcccgttgtaaattttcaaggacggcgacttccatcattgcggcttcgtcaaattgacgcgtgattgccggaatcgtttctttcctagctaatttagaggctctaaaacggcgttcaccggcaataatttcgtagccgttaatacttttacgcacgataatcggttgaaaaacgcctgactttttaatcgaagcggctaattcatttaacgccacttcatcgaacgttttccggggttggtaagggttgggacgaatatcggttagcgttaattcttccactaattcatcgtctcggtttttattaggcccttcgaacgcggagaaaacggcgtctaatccgcgacctaagccttttgaatttctattgaccattagcggctagcacctccttcgtcaaactctgataaacttcggcccctcgtgacttagcatcgtaatccacaatcgacatcccgtgactaggtgcttcagctaagcgggtattccgcggaataatcgtatcatagacgcgatcaccgaaatacttgcgaacttcttcaatcacttgcgcgccgaggttcgtccgggcatcatacatcgtcaataagaccccttcaatcgccaaattgggattaaagtgtttttgaaccaagcgaacggtattcaataattggcttaacccttctaaggcatagtattcactttgaacggggattaagattgaattgctggccgtaaaagcgttgatcgacaattgacctaatgacggtgggcagtcaatcaacacgtaatcgtaatctttcaaaacgggttctaaccctaattttaaacgcatttcgcgcgccatttgagccgtcaattcgatttcagcaccggcaagttgaatcgtcgcggggacaatatccaatcgttcgtgcgcggtgtggataatcgtttcagctaacggatattcatcaacgaggacatcgtagatatctttgccgacttgcgccttttgaacgccaatcccactcgtggcattaccttgtgcatcggaatcaataattaacacccggtgaccttcatcggctaaacaagcgcctaaattaatggtcgtcgtcgttttaccaacgccgcctttttgatttgctattgaaataacgtgtgccatcatgcaaccctcctatttcttaggaatttcgataatcatgcggtaaacatcatcttggtcttcttcagtggtcttaacggtaatcccacttttttcaaccaattgaactgattttttaatcgtattaaccgcaattcgtgtatcgtgtccgacattcttttcttttttagtggccgtttttttagtcgtctttttagtttcagcgaccggttcgtcagcgcccacttcttcggctggtgtttccacgactggattgacgatcccgtcaactaccgcttcagtgtctttaacggttaatttatccgccaagatttgatggaggaccatttgttgtttgaattcatctaattttaaaaggctccggccatgacgttcagaaatttcatgattcataattgcgtcttgaacgggttgggataatttcaaaagtcgtaacttgttagcgatgaatgattggcttttacccattttttcagctaagcttgcttgcgtgaaatcgttgagcgccattaagctcttgtaagcatccgcttcttcgaccgcggttaattcttcacgttgtaagttttcaatcaacgccatcgaagccgtttcgtgatcgtccatcgtttccacgatggcgggtagttcagcccattttaacgattgaatcgctctaaatcggcgttcaccagcaataatttcgaattgatgattctcatattcgcgcaagataattggttgtaacaaaccgtgttgttcaatcgtactggctaattctgcaatattttcagtattaaataccttccggggttggaaacggttgggcacgattgacgcgaccgggaccatcaccacctgcttaatatgtttgtcgtcttttttcttaccaaaaaatgaaattgccattatttttcctccttagccattaacggttttttaaccggtacaccagcgcgccgcggatatttatccggcgttggttggattttatcaatgatgataatgtgtcgtgaatcgttggtttctggtaacgtcaacgcaatatcgtcaactaaccggccaccgagcacggttaatgcataatccgcatccgaaagttcagtcgcactttgactcgcctttaacgcgataaattgaccgccgactttgacggccggcaaacagaattccgctaaaacgtttaatgaagcgactgcgcgggccgtcacgatgtcgaactgttcccggtacggactcttaagttggctaaacagttccgcccgatcatgaactaagcggacgtcagttaaaccaagttcttgaactaattcttccaaaaaatgaatccgtttatttaatgaatcaacgatcgtaattttaagttggggaaatagaattttaatcggtaacgacggaaagcccgcaccagcaccaatgtcacaaatacttaacggttcgttgcgcagttggtcgagatagagcgccggcgtaattgaatcgtaaaaatgttttaaatagacggcttctcgttccgtaatcgccgtcaaattgacgttttgattaacggcgactaaccgttcaaaataacgcgcaaactggtcggtttgtttttgtgaaactggaatatcatgggcttttagcgctgctacaaaggcggtaggtgtcattatttctccttatatatcgagttaattaatcatcagaaatcgtggaacaataattgtttcacgcatacattttagtttaacctacttattattaaaaaacaaggttcaggcgggccgatttactgtttcatgtgaaacgtcatttatccgtaaattaagaacaatcagtccctttatcacaatcaacattcattaagaaaacccttttacatcaatcaaatcgatgaatgcccatagaaagcgaacaatcccgattgtctaagattgtatattcgctttttactcaaattttaatttgaagtcactaatagcgtgtgctaaactgaatattaaacaaaatttaaacaacgatacggagggacactttgtggcagatattcagtccgactcagtgcaaacaaatcacccagcaccaaaactttcccatataaaggcggccatccttggtttacaacatctattagccatgtattccggcgatgtgctcattccgcttttagtcggggcagcactgcatttcaatgccgctcaaatgacctacttagtttctgttgatattttcatgtgtggggtcgcgaccttactccaattaaaacgcacgccactcacggggattgctttaccggtcgtcctcggctgtgccgtcgaatacgtcgcacctttaacggcgattggtacgaatagccaactcggtatcgacgtcatgtacggtagtattatcggcgccggcgtcttcatccttttggtttcaggcctgttcgcccgacttcggtggcttttcccaccagttgtcacgggttcactaattacattgattgggtttactttgattccagtcgccttccaaaatttaggtggtggtgatttaaccgctaaaactttcgggagcatgccgaacttaatcgctggttttgccacgatcgctttaattctcatttttagtatctggggccgcggtttcgtccaacagatcgcgattctgatcggcatcatcggtggcacgctagtcggcgcggccatcggattggtctcacttgatccagttggtcaagccagctggtttaaattaccgcaattattctatttcggcaccccccgctttgaatggtcctcaatcgcctcgatgtcactcgctgctttaaccacgatgatcgaatccatcggcgtcttcttcgcactcggcgaaatcgtcggtcgcgatattacgagtgatgatttaaaacgtggtttccgtgctgaagggattgccgccattcttggtggtctgttcaataccttcccttattcaactttctcgcaaaacgttgggatcgtccaattgtccgggattaaaacgaaaaagcccgtttattattcagccttcttcttaatcttcttaggcctcctacctaaaatcggggcggttgccacaattatcccctcatctgttttaggcggcgcaatggtcgtgatgttcgggactgtcggaattcaagggattaagatgttacacaaagtcgaccttgatgataaccgcaacctgctcgtttcagccgtctctattggcttgggactcgggattgcgattcatccaaccttactccaaggcttaccaatcagtgttcgaacaatcttaggtaacggcctagtcgtcggtagcctaagtgccgtcatcttaaacttattattcaactacaaatcattacttgccagtcggcatgctgcataaataaagcataaaaggcgcgattccaaatggaatcgcgccttttctatctttattctggtgcatacgaaatcgatgagaatttattaaaggttttgacgaacaataatttgaccgtcccccgagcgccagcccggtttttttcgataatgacttccacttcaccgacatcggaatcttctggttcttgcggtgctggtgcgttaccaccattataatcgtcaccatcttcgccgggttcatcacgataataatcatcccggtacaagaaggccacgatatcggcatcttgttcgattgatcccgattcacgaatatcggacagcactggtcgtttatcctgacgttgttcgacgccccgtgaaagttgggatagtgcaatgacgggcacccgtaattccttggctaacttcttgagttgccgtgaaatcgccgagacttcttgttgacggttttcttggccggaaccttcaatcaattgcaaataatcgatgacgattaacccgacaccatctttttctttggctaaacggcgacatttagcccgaatttcagccattttgacgccgggtgtatcgtcgatataaatattagctttagacaaactacccattgcgacgattaaattctgccattcttgttcatccaattgacccgtccgtaaatggttagcgtcaatactgccttccgcacacaacatccggttaaccagttgttcggcacccatttccaaactaaaaatcgcaatattttcattcgttttagtcccaatattttgggcgatattcaaaacaaacgccgtcttcccaaccccgggacgggccgctaagataatcaattcatcggcatgtaagccggcggtaatcttatctaaatcccggtaaccggttgaaagacccgtgatatcttcttcgttttgatacaatttatcaatttgttcgatggatgaattcaagacgtccgaaatggatttaaacccggccttattttgacgttcggaaacgtccataatttctttttcagccgaatcgagaatatcggtgacgtcttcatcttgcgcgtaacctttagcgacaatattttgggccgtttgtatcaagcgccgtaacatcgctttttcagagacgattttagcgtaataaacaacattggcggcggtcggcactgaatcggctaattcggctaaatagctaataccaccgatgtcttctaattggttgcgggcgtcgagttcactctttaaagtgaccgcatcgatgccttccccccgttcgttaagttcaaccatcgtttgaaagatgagttggtgggcccggcgataaaaatcatcggttgaaacgtattccatcgcttcaactaatgcgtcaccactaataaacacagcacctaacacggcttgttcggcttcattattttgtggtggtgtctgttcgattagttcattattcaccctgattacccctttatttctgtcctgtttcatgctcatatcataataccacaaaaaaaaaaatcgtgattcaatgattgatcacgattttaaggcaactttattcagtgacaatgtgaactcggatagacgcttcaacttccggatgaatccgaaccgtcacactccgatatcccaatgctttgatgggttctggcaaatcaattttacgtttgtcgactttaattttatattgttgttctaaggcttgcgcgatttgtttgctaggaattgaaccgaatagtcggctatcttcgcctgctttagatttgatttcaacgattgttgcgtcgtcttcaatcttcgtttttaacactttcgcttcggctaattcagctgcggcattcttagcttcagcatgttgttgcccttttaaagtactgatggctgaagtcgtggcttgttttgccttaccatttttaattaaaaagttttgggcgtaaccatctggcacgtctttgacttggccttttttacctttaccacgaacatcttctaaaaatatgactttcatctttgggaccacctttatcaaatttaatcatgtttggttgtttcatcgtcttcagctggatcaaataattcagctaagacggtcaataacttggctttggcttcactaaccgtcgcatctttcaattgcgtggctgcgttggataggtgcccaccgccgcctagtcgttccataatgacctggacgttaatgtcccctaaactacgagcggagatggcaatcaacccatccggacgttgaacgacgacaaaagccgcttcaatccccgataacgagagcaacgtatccgctgcttgggccgcaatcaccggatcataggtccgattgtcttccccaagacataatgccatattcggttcgaccatatcaattgtttcgattaaatggttcttttgaatataattatcgacgttttctttcaataaatgttggaccatcgacgcatccgcgccgaccgaccgtaaataactagctgcatcgaacgtccgcgtcccggtccgcattgaaaatgattgggtatcgaccgtaatcccggccaacatcgttgtcgcttcaaacttattaatattcgccacgttttggggttggtattcaaacatttcggtgactagttcacacgttgaagacgcgtagggttcgatataaaccaacatggggttttctgggaactcttccccccgtcggtgatgatcgatgacaatcgtcttttgattgagcttctcgtacaagtctggcgccatcgtgatggatggtttagaatgatcgaccatcactaacaaactattgtcggtcgctttttcaaccgcttcttcgggtgacaaaacttcgaccgcgatttctggataagccttaacctcttccaataagcgttgaatgtcagtatggatgttattttgatcaataaccacgtaacatttcttaccattcatctcggcaattcggcgaatcccaaacgaagcgccgagcgcatccatatcagggcgaatatggcccataacgaagacggcatcgacttgtttgaagacttcttggagtgcttgtgaaatcatccgggcccgcacgcgagtccgtttttccatcggattggttttcccaccatagaagcgggcttgaccgtcgctcgatttaacgaccacttgatcgccaccccgacctaacgctaaatctaaattactttgggaagtcgttgctaaaacggctaaatcggattccccgtaggcaaacccaacactcaaggttaatgggaagttttgtttcgacgtttcttcacgaatctcatctaaaattttgaatttttctttttcagcggcgtgcaaggattttgcatacgccaacacgaagaaatggtcatcatcaacgcgtttcaagaacatctggaactggttcgcccatttcgataattcgttggtgacgtagttattcaagttagaaacggcttgatcatccatcgtctgggtgatttcatcgtaattatctaagaaaacttggccgatcgcaacttgttcgtcttcataacggtcttcaatcgccgcataacgcgtgatatcgagtagataaacaaccccgatactttcttgaataataatttggaactgattatcgccccaatgaacaattttcgtatcactagcggcttcattttgggtgaccaattcggctagttccggatcaacctctttaatcggcttgcccaaaacttccttatcacctaaatactgttgtaaatacggattggtccactgaatctcgcctttttcgttatacaataagattccgattggcatcttaatcaaggcctcttgttcgccccgtttaatccggtaagacaaatcagagacgtacttcgccgtattctcagtcaccgtttcaatcgcgtacaacaccgtaatcacggtcccgattaataggacaaacaaaatcaaggcgattagccagttgagcatcgcggcaaaaaccaaactaacaacggttaagcccatcaaaacgagcgcaacggtccgtaagcgactatcgtctagaaactgcggcattttaaactgcttaaatttatttttcatgtaaactccttaactcttaaaaaaaagtatgctggtcattacattcacaaacaataatatgatccctttactaaatcttaaagaatcattaccctattttagcacattttaaatcagagtgctgtgacacacggtaggttctgagcattagcctagtaccgtaaataaagctcgctctatagctttatttgcggcacgtcgctaagcacaggaacctgtgtgtcgaagcacgttttgaacagagtgcgttggttgcggatagcacctgagcattaagccaaactgaccaattatcttgggcttaagatgattggtcagtttagattaagcggaaggtgttgcaaccaaaagcacgtttaaatcagagcgctgactaagcccggttacttctgagtatagcctaaaataccgaattatgactgtttttagtcatgattcgatatttgtagctagacggaagaagtaggcttagaagcgcgttttcgaacagggcgctgactatgccagtttacttctgagtatcgcctagactagcgaattatgacgggttttagtcatttgtcattggacaaaaaaaccaccgaccaagttaacctcggtcggtggtttgaatttaaagtttagtcttcagtaacgaatggtagtaagcccatgatccgagcgcgtttgattgcaattgtcaaacgacgttggttcttagcacttgtaccagatacgcgacgaggtaaaatcttaccacgttctgagataaaacgtttcaataaatcagtgtctttgtagtcgatgtagtcgatgtgattagcagcgataaaatcaaccttacgacggcgacggttgccgcctcttctttgttgagccattgaaaagtcctccttccacaacaatctatttgatttcagttagaaaggtaaatcatcatctgagatatcaattgcttggccattatttgcaaatggatcggcaggtttgttatctgcaactggtgcattacccgtttgttgagggttggtaaaaccggtttgttggctaccagtattttgttgaccgccaaagttttggtttgtgcttgcgcttgaaccttcaccttgtcggtgttcagttgtcgtccgtgattctaacaatgagaaattatcaacaaccacttcagtcacgtagacacgttgaccttgttggttttcataatttctagtttgtaaacggccttcaacaccaactaatgagcctttcttagtaaagttcgcgaaattttccgctgatttacgccaaataacacagttgataaagtcagcttcacgatcaccattggcgtttgtgaattgacgattgaccgccattgagaaagtcccaacggctgctccactagaagtgtaacgtaggtcaacatcgcgtgttagccgaccaacgagtacaactcgattaatcatgctattagctcccctctatttcttaattacaattcaaaattagtcttcgcgtttaacgatcatatggcgtagtactgagccatcaatcttagctagacgatcaaattcgtttaaagcttcatcattatcagctaaaacatttacaatatggtaaatgccttcgtgttgattgttgatttcataagctaaacgacgttttgaccagtcttttgaatcaaccacttcagcgccgttgtcttttaagatgccgtcgtaacggttgacaagggctgttttactttcttcatcaagtgttgtagtgatgatataagtaacttcgtattttgattgagccatgactgttcacctccttatggactttaggttcttactcaataagaacaaggagtaactgactaataaattagcctcacgatttaggcccgatgcctaaatcacagatactcacaatataaaattgtatcataccgtttctgaaaatacaatcccaaacaaaaaatcgcttttgcaaatgaatgcaaaaacgattaatgatttaattatttttctgaatctggttgttcgtcttgatccgcttcagcgcgttttaagagttcatcaacctgtgctaatcccgtatcagttgaatctgatgcaactggtgtttcagtggtttcaggcgttgttgcttgcccttcaacgacttcggcttcatccggttcagcttccactttggccattgttgcgaccttggcttgatcatccactcggattaaacggacccctaaggttgcccgaccggtttgtgagacgttcgcgacttggaatcgaattaagaccccagtatcggtgattaagaggatatcttcttcaccggtgacagcggtaatcccggctagtgggccgttcttttcagtgatattggcagtcttaatccctttaccaccacgacccttaattggataatcactaacagtcgttcgcttaccataacccttttcagaaataactaagatttcttgaccaggaatcagtaagtcagaaccgacgacgtaatcgccttcgcgtaaacgaatcccacgaacaccggctgctgtccgacccatcgaacgaaccgctgattcgctgaatgagacggcgtaaccattgtgcgtcccgataaagatgttttgttgaccgtcagtcaataagacgttgatcaattcatcgtcttcttttaacgtcaaagccttcaaaccgttgctgcggatgttggcaaattcgctaacggatgtccgtttaaccgtccctaaacgcgtgataaagaacaaagcttgttcgtctttgatttctttacccaagttaacgacggtttgaacccgttcatccgaattaatccctaagagattaatgattggaatccctttggccgtccgaccgtattcaggaatttcatagcctttagcgcgataaactttacccgtattggtaaagaataggagcacttcatgggttgatgtcgagattaagtgttcgatgaaatcatcatcatgaacgcccatcccttgaatcccacggccaccacgattttggactttgaattcactggctggcaagcgtttaatgtaaccattgtgcgttaacgcaatgacaacatcttcttcttcaatcaagtcttcatcttctaagctgaggacttcaccgaccaataattcagtccgacgtttgtcgccgaatttattttgaatttctaacaattcgtcataaataattttttggattcgttcaggtttcgccaaaatatctttcaaatcggcaattaaagtcatcaaattattgtattcattttcgactttatcccgttccaaaccagttaatcggactaatcgcatgtctaaaatggcttgggcttgtttgtctgaaagttgatattgatccatcaacaagaccttcgccgtatcaccggttttagcgctccgaataatctgaataatcgcatcaatatggtctaaagcaatccgtaaaccggccaaaatatgggcgcgggcttcggccttcttcaaatcaaattcagtccggcgacgcaagacttcttcttgatggattaaataatattccaaaattgatttcaaactcaagactttaggggcaccgttgacgatggccaccatattaaatgagaatgatgtttgtaatggtgtcagcttgtataagttatttaaaaccactgaagcactcatatcacgacggacatcaatcacaatccgcatcccgtcacgatcagattcatcgtttaaatcggtaatgccttcaagtcgtttatcgcgggctaattcagcaattcgttccactaacttagctttgttgaccatgtaaggaatttccgtgacgataatccgttcacgaccactcttttggacttcaacatcgaccttggcccgtaaggtaatcgtgcccttaccggattcgtaagcgtggcgaataccagacttacccatcactaagccacccgttgggaaatcaggtcccggcatggcttccatcaagtcagcagtcgttgcttctggattatccatcaaaatatgcaacgcactaatgacttctgccaagttatgtggcggaatattagtcgtcatcccaacggcaatcccggtggccccattgacgagtaagttcggaaaacgcgctggtaaaacagcaggttcccgttctgattcatcataattgggtacgaaatcaatcgtatttttattgatatcacgtaacatttcaacagccatcttgctcatccgggcttcggtgtaccgcattgcggcagcgccatcgccatcgactgaaccaaagttaccatgaccgtcgactaacatataccggtaactaaaatcttgggccatccgcaccatggcttcataaattgcagaatccccatgtggatggtacttccccataacatccccaacgatccgggccgatttcttatacggtttttcaggggtaacccctaattcattcatcccgtatagaattcggcgttgaacgggttttaaaccgtcacgtacgtcaggtaatgcccgggcaacaatgacgctcattgcgtattcaaggaatgacttgcgcattgttttagataaattgacgttttcaatccgcccgctttggacatcttcgtttgccattaatcgataaacccctctcaatcaatttcagttcaagcttttattaagcatcaatactctttggatccatataaacggcattttcttcaatgaaaatccgacgcggttcaacccgatcgcccatcaacatttcaaaaatttgatccgcttcttcagcgtcttccacattgacccgtaacatccgacgattgtctggatccatggtggtatcccataattggctggcatccatttcacctaaccccttataccgttgaacttctggtttcggacttggttgcaacgtccctaaaacttcttggagttcttcatctgaatcgatgtaacgcatcatcttaccctgcttaacccgatacaaagggggttgggcaatgtacacgtaacccgcttcaacgacgggccgcatgtaacggtagaataacgtcaataacaacgtccgaatatgggcgccatcgacatcggcatcggtcatgatgattaatttatgatatcgcgctttgctgacatcaaattcttgaccaaaacccgtgcccattgcggtaaataaggtccggatttcttcattggcgagaattttttccatgctggctttttcaacgttcaaaatcttcccacgaattggcaagatggcttgcgttaaacgtgaacgacctgatttagctgaaccaccggcggaatccccttcgacgatgaataattcagaaattgcgggatctttactactattatcggctaatttcccgggcaagtttgaaatttccaaaccatttttcttccgagtcacttcgcgcgcacgtttagccgctaaacgtgctttagcagcgagtgagcctttgtcgacgatttgacgagcaattgctgggttttccatcaagaacttcgtaaagtgatctgagaacatccggtcagtcaccgtccgcgcatcagaattacctaatttcgtcttcgtttgaccttcaaattgaggatctggatgtttaaccgagacaacggccgttaagccttcacggacatcttcccccgataaattcgtatcgttggcctttaaaatattttgtttagtcgcataatcgttgatgacccgcgttaaagccgtcttaaagccggattcatgcgtcccaccttcgtaggtgtgaatattgttggcaaacgtcatcaaatttgtccgataatcattggtgtattgtagcgcgacttcaacggtaattccgttttgttcgccttcaacataaatcggttcgtctaatagcgtttctttgccgtgatctaagaattcaacgtaactcttaatcccaccttcatagtggaattctagtttttcatgcgtcgctgcgcgtttatcggtgaacgttagttttaaacctttattcaagaatgctaattcccgaatccgggtcgtcaaaattttatcgtcatagacggttgtttcagtaaaaatatcaggatctggtacgaaatggactttcgtgccgtgttcatgttcaggggcatcgccgatttctttgatgggtgtgttgaccttaccacgattgaaatcgatatagtagcgtttgccttcatgcgtgacaacggcgtctaacgtcgttgacaaggcattgacgactgatgcgccgaccccatgcaaaccaccagaaactttgtaaccgccgccgccgaatttaccaccggcatgcaagattgtgaagaccgtttctaaggctgatttacccgttttggcttggatcccgattggaatcccccggccatcatcggtgacggtaatactattatccgcttcaacgacgacgttaatttccgtcgcaaaacccgctaaggcttcatcaatcccgttatcgataatttcccaaactaaatgatggagaccttgtgcactcgtagagccaatgtacatcccgggacgtttacgaaccgcttcaagtccttctaagacttgaatttgactggcatcatactctttagcgcgttcttcttttgcttcaatctgttcttctgttggttgatttaattgttcgtcttctgccaagtgaaattcctccgctctctagtctgtttgtgctgctgttgtttcagtgacaaccaacccgtcggtcacgttaaagaccttgggcgttgcaataatgtcttttttaacgttttcaagactagtcgtcgttaaaaaagtttgcactttattttgaaacgtctttaacagatgtgtctgccgtaaatcatcgagttctgacaaaacatcatccaataaaagaaccggatattcaccggtttgttctttcattaaatcaatctcggccaacttaacacttaaagccgtcgtccgttgttgaccttgtgacccaaaagactgcacatccttatcattgacgataaattgaacgtcatcgcgatgcggaccgactaagctagtcccctgttcgatctcacgaccctgttgttgttcatacagtttctgaaatgattgatacaacgtttctgaatcttgactcaattgctcgctatcgagctgtgtttgataacgaaacgttaatttttcgcgacctttagtaatttcttgatgcagtttttgcgcccatttctccatttgttgcaagaattgataacgcgcaaccgtcacctcagccccatacgccgctaattgatcagataaaacgcctaaatagaccaaatctttggcttgatgccgttggagttgtttcaaatattgattacgttgttttaaaatcgctttatattgtgaaatattgtagagatatttggcactcatttggccaaattccatatcaataaaccgccgccggactgctggtgatcctttaacgatgtttaaatcttccggggcaaataagacgacgttgagttggccaatgtattgggacaacttagcttgctctaaatgattgaccttggcttttttgcctttatggctcaacaccaattccaaaggcacttgaccaaccgtccgttgcacttgtccggtaattttagcaaattcactatcccactggattaattcgcgatcattattggtccgatgcgaccgcgccaaagctaagacgtagatggcttctaataaattggtcttaccttgcgcattttcaccaatcaacacattggtatccggcgagaattctaaggccacctgatcataattccggtaatggtccaattggagcgcacttaaatacatggtgtgctacaagctttcttgtttaatgatcttaaactgaccgtgatcaggcacttcaaccacgtcatcagcgtataacttccggccccgacgatcatccgcttcaccgttgactaagacggttgtttcgcgtaaataccattttgctttgccacctgttgagacaacgccttcttctttgagtaactgtcctaatgtcacgaattcagcctctagttgcacttcttgtatcataacaacccaccattcttaatgatcttaattaatttgtgactaatctcgaatcttactcacaattatagacttttttacccttaaaaacaaataaacatcgttaaaatcgcttctcagcgtttttagcgattttaaacatctcctacttgcaaatgctgaaatcgctctaacataatttattttagatttgaccacgatccctaattacactatttctcaaaaaaagagctgtgatataagcctcagtattctgatattcttcgacgcgcaccataactcagattgataacgtgtagtcattcacagtttcctgtgcttatcgacatttcgcaaccaaagtccaaagtacggactttattcacgaaactaggctaatgctccgaaactaccgtgagtgacagcacttaaatcatagcgtgcttctcaagtagccttttccggttaactacaaaatcagcgttatgattcagagtacaaatcataacgctgatttctaggttaatcctcaaagcctgaccaacttgagtcagcactcagttgctacccgcaacccaacacacttaatttagaacgtccgtacaggggtgatcaattgaatatagtgttcttgatcctcactaggtactaaggtaaatgggcgtagtgctgaagtgaagttgatattaatcgtggtttggccaaatgagcgaagtgcgtctttcatataatcaggattaaatgaaatttccaaatcttcacccgttaagttttcgaattggagtgcttcttccacattcccgacatctggcgaattaccgtaaataacggccgtttgatcggcattatttaacgttaagcgcacgacgttgttccgactttcatgtgataacaatgaagcccgttcaatggcggctaataaaacaggggcgttaaattcgatttgggtacttgaactggttggaattaaacgggctgtatcaggataattaccttccaataaacgtgaatagaatgccaaattacccgctttaaagagcacttggttttctgcaatccgtaattcaacgttatcgacatcgtctgcgagtgttctggaaagttcaattaaactcttccctggaataatcacgtcgtaatccgtgtcttctggtagatcaaccgtcaatttacgttgggctaatcgatgactatcggttgcaacggccaacatttcgccgttgtctaacactaaatgcacgccggttaggattggtcgactttcttgatttgaaacggcaattacggtttgatgaattaattgttttaagacatccgtactgatgctaaatggattttgtcccgcaatttcaggtaaatgaggataattattagcatctaaaccgttaattgtaaattctgacttacctgaacgaatcgtggtttggaaattatcaccaacagcaaccatcatttggtcttctggtaattttttaacgatttcactaaagaaacgtgctggtaacacaattgagcccgtttcttcaatcactaattgattcttttcatcattagtcgctaaagtcgcttcaatagaaatatcagcatcactaccggttaatgttaagccttcttgagaaagcattaatttaagcccggttaaaattggaatagtggttttagctgaaatggcacgttgaacatcattaagcgttttgatgaataaagcacgattaattgaaaatttcataagtctaatcctccggagatttaagtatatatatatattaaagatttttaagtaatagtagtagggcctgtggaagctgtggataaagtagaaaacctaaagtgccaatagttttccacttgtggacaagttgtgtaataacctcaggataactttaccagttgtccacaggccgttttaaccggttaacgtattttttaaatctaagatggcgtcttttaaattttgatcaatggccatgccttggctgattcgttcgtgggcgtgcatgacagttgtatgatctttaccgccaaattcttggccaattttgggtagagagctatcagtcatttcgcgggctaaatacatggcaatttgccgtggtaggacgatttctttgacccgtttgcggccttttaaatcagcaattgttaaactgtaatatttggcgaccacggattgaatcttcgcgattgataattggctggatttaccattcagtttcaatcctttgagggcgtcagctgctaaaccagttgtgatttcagcattttgcatcgtcgcgtaggcttggacccgcacgagtgccccttcgagttctcggacattggaatcaatttgacccgcaatatagctgagcgtatcttccggaatttcaagatgttcagcgtccgctttatttcgtaaaatggcgattcgagtttccaaatcaggtggtgtgatgtcgaccgataggccccatttaaaacgggaaactaaccgttcttgtaacttgggaatttcattaggtaaccgatcagaggtcaggacgatttgttttttatcattatataaatcgttaaacgtatggaagaattcttcctgcgtcccctctttatcggcgaaaaattggatatcatcaactaataaaagatcgacattccgatattcctgacgaaatttttcctgatttttagtttgaattgaattaataaaatcgttggcgaatgcttcactcgtcacgtattttacgttggtatcgggtttagattccaataattgatgcccaatcgcttgcatcaaatgggtttttcctaaaccgacgccaccatataaaaagagtggattatacaagacaccaggttcttctgaaaccacgagtgctgcggcgtgcgccatttgattccccttgccggtgacgaaggtgtcaaatgtgtatttactatttaaatgggtttcacgcaaaaaagtcggtgtttcagctttcgttaaaggccgcgaagtgagtgattgatcggcagctaagttgtcagattccccaggcaacacaaaaataggggtcaattcgatttcagcgaattcatacgccccttcaacgactttagtcgctaaattattttcccaatattctttgtgtagaactgacggtacctcaatcactaattcattcgctctaaaagcaagtggtttggcggttttaatccaagcgttaaaaccaaccggggttaaatctgtttggaatttatcccgcaaatagttccaaagttcctgaagatcaggcatgtagcgtgtcccccttaaataaaataaccactttattgaaaaaaacagcaatcaataaagactaatcctattttagcattatgaaaaaaagttttccacaagaagcgctaaatccacaagctttattttaaaagttttccactaatccacaagcttggggattaagacaaataacgcttgtggaaaagtaacgaaaaaaatagttttttagagttatccacaaaagtagtgtgtaaaagaagctatggtgttataatgtttttatgagttatcaacagctcggaaatggcctgtggattacttaagaacagcctgtgattttccggataacgccgattgttacttggggataacaaatttggatgatcgaccggattgtgcttatccacaaaacaagtcactaaaaaaataataatcgaccgggatttattcagaacttttttagagaaagtgtttcaacttttgcagaaatatgctattatattttagtgaatgtcgtaggtggtattgatcaccgttgtttctgaataggtaacaatagacacagtcaattaggaggtgccagattaatgactacaaagagaactttccaaccaaagaaacgccataaagaacgtgttcatggtttcatgaaacgtatgaatactaagaacggtcgcaaggtacttgcaagacgccgtgctaagggcagaaaagtattatctgcataggccactgatgcttcagtggtttttttattatcctcgattttaattttaaacaaagaaatgccggagtgaattatgagaaagtcgtaccgtgttaagaaggaacaggatttccaaaccgtttttgaagctagccaatcggtggccaatcgcaattttgtggtttaccgcttagacaaacctggccaaaaacattttcgtgtgggcctttccgtgggtaaaaaagtcggaaatgcagtcatgcgtaatcaggtaaaacggtatattcggcaaagtttgaccgaattaaaaccggatttgccgcaagctgttgattttttagtcattgcaagacggggtgccaatcagttaacgatggcggaaaccaaacagaacattagccacgtcttaaagctggctaagttattaaaggaagaagcagattctgcttctgaataagtgagggatattggcgtgaagtctaaaaatcgtaaacgactattattagtcgctagtttgttcttatttatgttaatcgcagcagggtgtagtacatcagccgttaatagcagtagtactggtatctgggatcattatattatttataatttctcacgcttcctattgtggttagcagatttgttcggtggtagttacggttgggcgattgtcgcgtttactttaattatccggattattattttgccgttaacttggtggcaaagtaagagtatgttgaaacagcaagaagttgcgcctgaaattcaagcgttacagaagaaatacgctgctaaagatactgaaacgcaacaaaaattacgtgaagaaacacagaaattatatgctgaagccggggttaatccggttgtcggttgtttaccattagtggttcaaatgcccgttttgattgcgttataccaagcaatttatcggacagctgctttaaaatcagggacattcttatggatggaactgggtaaagccgatccgtatttcattatggcgattttggcggccatctttacgtttgggacttcttatttaacgatgttgtcacaaccaacgaagaatgcggcgtcatcagcgatgctttgggtcatgccggtcatgatttttgtcatggcgatgaacattgcctcagccgtttctatttactgggtggtaaccaacgccttttcagtggcgcaaacaatggtgattcaaaatccatttaagattcgccgggaccgtgccgctaaggaacaagacaagcgcgatcgtgaaaaagcgattgcgaaagcgcgcaaaaaagcaacacgaaaacgttaataaatctaaaaaaagctgattcctttggaattagctttttttgatttattgaagttaattgataatcagtgaataggcgtaggggctttcgaaaatgccggccgtttgatacgtaatcggttgtttaaacaagggaccatcaacgactaaggtatgatattcaccattttcaccacaaacatctaaattatgggcctgtaaataatcaatgaaggtttgatcgagtggctggccgaggaaagctgttgggatttttgacgctttgctaacggttttaataatcgcggtataaccccggtttaaaaaatggtggacattggcggttcgatccgcttgccacaaaggtaacagcgggattaattgcgcggcatgggcgacagtttcatcccactgccgattttggagaatgtcgatatcgccaaagccacaatgggtgacgccttgtttctgatactgggttaaagccgccaccatggccgtttgataatcatcaacttgagtattgacgagtgtgaggggtaagtctaagctggtaccaatttgggtcaggattgcgggcggcacgccatggaaccaagaccgttggatatcggcgttcaaactggtgattaaaccggctggttggtagcccgtctgaattaaagtatctagggcaatcaaactatctttacctgtgctgaaactaaagcaaaatgaagtcatttgagtaacctccttgtgattagtttaagattaacaagaatttcctgggaaataaagagcaatcatcgcactttatagacagattggttataataaacaccatcagactaactggaggacttaaaatgacatacgcagaacagtgggatttagaatcaatcttcaccggtgggttaaaatcaaccgaattgacgacgcgtttacaaacgttgaaggcccaaattgcgacgaccttcaaacaaattaatgattggcaatatgcaaaagaggcagctgactttagccaactgcaacaaattaccaatcaattacaagcgattgaagatgggctaaaacagaccgggagctttgtcaacatgcaccaatccgttgatgaacgtaaccaacaagtcgcaccgctaatgggccaaatcaatcaactccaaaatgccgcgacgcaaattgacgtccaactgaccaaaaaattggtgacgttaacggcggctgagtttgaaacgttggtcggacaaccactttttgcaccgattgcgtttaatttgcgtgaaaagcggacgcaaggcgcgcaattattagatgaaaagactgaacatctgattaatcaattggcgttagatgggttacagggttggagtgaccattatgatacgttggtggctgaaattcagattccggatgagggtcaattattgtcagcgggccaagcccaaaataaatttgaagccgatccggatccaaaagtacgtcaacgcgtgtttaccaattggtcacaaacttgggatcgttattcaccgttattgacagacacgcttaatcatttagccggttttcggttgagcgattatcaagcgcacgggttaactgatttcatgcagaaaccgttggaatacaatcgactccaatcagcaactttaaagacgatgtggcaagttgtcagtcaaaataaagccccattggtcagttttttaaaccgaaaagcggccctgatgggtaaaacgcaattggcgtggcaggatacttggtcacccgtaattgtcggtgattttaaacctgcgacgtattcgtatgatcaggcggctgaattcattatccaaaacttcaaggcgtttagtcctaagatggcggccgttgcgcaacaggcgtttgaaaagcgttggattgaagcggaagatcgaccaggcaaacaacccggtggctatatgactgaattaccagaaacgcaagatttccgcatctttatgacctttgacggcacgccgagtggggtatcaacgttagcccacgaattaggtcatggtttccacacgatgatgctgaatggtttaccaagttggcgtcaggattacgcgatgaacgtcgctgaaacggcttcaacgttagccgaattaattgtggtggacgcaacagttcaggccgcggattcaatcgaagctaaaatcaacttattggatcaaaaaatcacgaatgcgatcgatatgttcatgaatattcatgcacgctatttatttgaacatcatttttatgcagaacggcaaaatggttttgtgccaactgcgcggttgaaaacgttgatgttagacgctcaaaaagaagcgtatgcggatgctttaacggattacgatccgttgttctgggcggataaacaacatttcttctttgacgatgtaccgttctataactttccctatacgtttgggtacttattctcattgggaatttatgcgaagtcgcaagaagttgatcagtttgaagatcaatacattgccttgttgcaagatacggccaatatgacgacggaagcattagcccagaagcatttaggcgttgatttaacccaaccggccttttggcaagcggcagcgacttcaattcaaagtgatattgatcaatttatggcgctaaccgaggcctatttatcaactgacgcgcgttaaaagactagcatgttataataaagagaaatacggaataatgggaggattgaaagtgcaaacttttcaaggagccaatattcaagcagcgattgatcaaggattggccgttttaaaggtcacgcgtgatgaagtggctgtcgaagtgattgaagaaggcaaaaaggggtttctgggatttggtaagaagccagcggtggtcgaattaaagttggtcgcaccggttattagtgaggcaccaaccacgacgacgcaaacggtggcaccaattaaaccgacagcccactcgaaaccagcgaaacgggtcaaacaagatgaagccgaagccgttcaggcggtatcgacttatttaagtcaaatgaccacgcaaattgggaccccggtcacaattaaagtccaacgacaacataaagtgttaacgtatcatttgcagaccgataaagaaggtctgttgattggcaaacacggtaagacaattaatgcgctccaatatttagcgcagacttactataatcatcatgctaaaggaaaacagacgattattttagaagtcggtgattatcgtaaacggcgcgcagcgattctagtgcatttggcggataaggcggcgcgtgaagtcgttgcgaccggtcaatcggtgaaattagaccccatgccggcgtttgaacggaagattatccatggtcatttaactgaaaatagccatgtgcaaacccattctgaaggccatggcgatcgccgttatttggtgattgacagtaaccgttctttttagtggttgataattgacgtgcgattgtaatcgtgtataatgtaattaattaaatatcgataaagtagtgaaagtgctttgtccattccgacctaccaaggcgcggagtggacgctaagcgctttttttatgcagctatttcagaaaggaagcttttgcatgccaaccaaagtaacagaatttgatacgattacggcgatttcaacaccacctggtgaaggggcgatttcaattgtgcgcctatccggtgatgagagtttggcgattatccaacgggtttttaaaggaaaagatttaacgcaagtggctagccatacgatcaattatggccatattattaatccagaagatcaagccatcgttgatgaggtgatggtttctgtcatgcgggcgcccaagacgtttacgcgtgaagatgtgattgaaattaattgtcacggtgggattgtcgccactaaccggattttacaactattgatgagttacggtgcgcggatggccgaacctggtgaattcacgaaacgggccttcttaaatggtcggattgatttaacgcaagctgaatccgtgatggatttgattcgcgctaaaacggatcgggcgatgcaagtcgccgtcgatcaattagatggtagtttaacgcatttgatcaaaaatctacgtcaagaaattttagaagttttagcccaagtcgaagttaatatcgattatccagaatacgataccgacgaaatgacgacgaagctattgcttgagaaagcccaattggttcaaggccggattgcggaactcttgcaaaccgcccaacagggtaaagtgttgcgtgaagggttagcgaccgcgattgtcggtcggcccaacgttggtaaatcaagtttgttgaatcatttattgcatgaagataaagcgattgtgaccgacgtcgccggaacgactcgcgacgtgttagaagaatacgtcaatgtccgcggcgtgccattgaagttagtcgatacggcggggattcacgagacagacgataaagttgaaaaaatcggcgttgcgcgcagtcgcgcggccatcattaaagctgatttaattttattagtgttggatcaaagtgaacccttaacggttgaagatcgtgaattgctagaagcaacggctgataagaaacgcattattattttaaataaaactgatttaacgaaccaaattgaccgtgccgaattattaacgctcgtttcagaatcggaattgattcagacctcgattttaaccagtgatggtgtcactgatttggaaaacaaaatcgctaaactattctttggtgggattgaaaatagtcaaagtacggtcatgattaccaatgcacgacaaattggtttgttaaaccaagcgcaacaatcattgacggaagtcatcagtgggattgcggctggtatgccagttgatctagtccaaatcgatatgaccaactgttgggatcaactcggtgaaattaccggcgactcagcacctgatgaattaattacggaactgttcagccaattctgtttaggaaaatagtaaagagcgagacaaaggagtattttgaatgcgcgaatatgatgcaaaacattatgatgttgtcgtggtcggtgccggccatgctggttcggaagcggctttagcagctgcccggatgggtcgcgaaacattattattaacgattaatttagacatggtcgcctttatgccttgtaacccatcattgggcggtccggctaaagggattgttgtccgtgaaatcgatgcactcggtggccaaatgggtcgcaatatcgataaaacatacattcaaatgcggatgttaaatacgggtaaaggaccggctgtccgcgcattacgcgcgcaagctgataagcacgcttatcaccgaacgatgaaacgcacgattgaaacgacgccacatttaacgcttcgccaaggcattgctgaaggcttaatcgtggaagatggcgtctgcaaaggtgtgattacgaataccggggcacgttacacggctgatagtgtgattttaacggccggaacagcctcacggggtaagattattatcggtgaattaacgtattcgtcgggtcctaataattcgattccttctattaaactctcagaaagtttagaagataacggttttgtcttaacgcgttttaaaaccgggacgccaccgcgagttgatggcaccacgattgatttttcaaaaacggaagaacaaccaggggataccgcgcctaaccactttagttttgaaacaccggatagcgcctacctcaaagatcaattatcttgctggatgacgtacacgaatgcgaacacccatcaaatcatcctcgataatctagaccgggcaccgatgtttaccggtgtgattgaaggggtcggtccacgttactgcccatcgattgaagataagattgtccgttttgcggataaaccccgtcatcagattttcttggaaccagaaggtcgcgaaaccgaagaatactatgtcggtgatttttcaacgtcgatgcctgaagaagtccaacataaaatgattcattcgattgaaggattagaaaacgcccagatgatgcgcccaggctacgcgattgaatacgatgtcgttgaaccttggcaattaaaacccactttggaaaccaaagtggttgaaaatctctataccgctggtcaaatgaacgggacttctggttatgaagaagctgccggacaaggtttgatggctgggattaacgccgcgttgaaacaactcggacaagcaccgtttgttttggaccgtagtgaagcttatatcggggttttaattgatgacttagtgacaaagggcactaaagaaccttaccggttattaacatcacgtgctgaataccggttgatgttacgccacgataatgccgatttacggttaacggctaagggccacgacttaggtttgattgatgatgcgcgttttgccgcctttgaaatcaagaaagccgcggttgaagctgaattagcgcgactagcaactattcggttgaaaccaacttctgaaatccaagcctttttagccgctaagggtgaagcgccattgaaagatggggtcttatccagtgacttcttgaaacggccggaagtgaaatacgctgatttactagcgttcatgcccgagattgacggtatcgataatcgggtcgttgaacaagtcgaaattcaaatcaaatatgcagggtacatcgataaggaacaagccaaaatcgcgaaactaaaacgcatggaagctaaaaagattcccgagaatatcgattacgatgcgatcgaaggcctcgcaacagaaggtcgtcaaaagctacaaaaaatccaacctgaaacattagcgcaagcgagccgaattggcggggtcaacccagccgacatcggtatcttgagcgtctacatccaacaaggaaagattgcgaaaatcaaatagagcgctggctcgaactgtttaggctttgaggattaacctaggaggaaccattgtgattgggttttaatcatgatggttcttccgtagttaaccggaaaagactattcgagaagcgcgtttagagtaagagcgcgactcacacggtaggttctgagcattagcctagttttgtgaataaagtccggggtaaggactttgtttgcgaaacgtagctaagcgcaggaatctgtgtgaagaagcgcgtttaagtagaagagcactgacaagcctggttaacttctgagtatagcctagagtaacggattatgaccgtattttggtcataatgtgttactcgtcgctagacggaagaagttggcttggaagcgcgttttggagcagagtgccgagcgagcggttaaccggaaaagactcattcgatgctcgttaatcatgaaagcgtcgatgcacgaactcaggttaaaattaggaatcaagttgataactagtcctgaactatggtacagttagaaatattgtcaatcgtcgaagccggtcgtttcacatgaaacggttggctttttagaattagaaagaaaagtgagggaatcaagtgataactgttagtgaaatgagcttaatgctttctgggcgtaagttatatgaagatgttaatttgaaatttacccaaggtaattgttacggcatcattggggccaatggagcagggaagtcaactttcttaaaactgttagaaggtaaactacaaccgtccgagggtcatatttcaatcggcgctaatgaacggatgtcgagtttgaatcaagatcattatgcttttgaagaatctgaagtattggacacggtcattcaaggccatcaaaagttatatgaagtgatgcaagcgaaagacactttgtacgctaaagctgactttactgaagaagatggtttaaaggccgccgatttagaagctgaatttgccgaaatgaatggttgggatgctgaatcagaagcagctcaattgttacaagccttaggtatcgatgaatctttacaccacgttaagatgagcgaattgatggaaggccaaaaaattaaggtcttacttggtcaagctttgtttggtaaaccagatattcttctattagatgaaccaaccaatggtttggatagtgcatcagttgattggttagaagatttcttagctgatttcccgaacatcgtcattgttgtttcccatgaccgttatttcttgaaccaagtttgtacacaaatgtgtgatgttgactttggtaagattaaaatgttcgtcggtaactacgacttttggttagaatcaagtaaattagcttctaaattacaatcaaacgttaatactaaaaaagaagaacaaattaaagaattacaagattttattgcgcgctttagcgccaatgcctctaaatcaaaacaagcgacatcacgtaagaagcaattagaaaagattacgttagatgatatccaaccttcttcacgtaaatatcccttcattaagttcgaatatcttcgtgaattagggaacgatttgttgcgtgttgaaaatgtatcgaagtccattgatggggttaaagtgttagacaacatcagtttttcagttaagccagatgaaaaagccgtttttgtttctaaaaacgatattgccacagccactttaatgcaaattttagcgggcgatttagaaccagatgctgggactgtcacttggggtgtcacgagtcaacaatcatacctaccaagagatacgaattctgcctttaacaacgatcaattatcaattttggattggttgcgtcaatttgctgctaaagaagaagacgataacacgttcttgcgtggtttcttagggaagatgcttttctcaggggatgaagtgacaaaagaaatcaacgtgctatccggtggcgaaaaggttcgctgtattttatcgaagattatgttacaaaaatcaaatacacttctattagatgatcctacgaatcatttggatctagaatcaattacttcattgaatgatgctttaattgattttaagggtgctttgattttcacatcacatgatcatcagttcattcaaacaatcgccaaccatattatcgaagtttcggctaatggggtggttgaccgtgctgaaacaaactacgatgaattcttagcacatccagaattgaagaaacaagtcgctaaattatacgaatagtattgaaaggattaatgccattttgaggtattaatccttttttattggtcttgatgaagtcattaaccgacaagtaaccggtttctagcctgttttactagggatttagaattaattcgagttatttgcagaaaatccttgcatcgattaattcgagttggtatactagtaaagttgtcgcgagagagctgttaaagtttaacggcttgaaagattaatcgaatgtttctgaaaaaaacacttgttattaaatcgaaatcgtgataagatattatatgttgcttaaggcgttataagttttaacttctaaacaacaaaaacaattttaaaaagtgtttgacagccgattgataaacattataaaaatcttgaataacaattaattttaggagattaagtattgtgaaatgtaaatagcaactgaaaagaagcgttttcataatgaatattaaaaaataagaaatcataaaaacactaaaattacgagatgagtcgctttaatcgtcggcaatatatggtagaattaaacaaaatggataagtagtgactgaattagaaaaggggtttacacatgattgataaaaaacaagtccagcatgtcgctgaactttctaaattagcctttagcgatgctgaattggctcaattcacggatcaattagccgatattatgaagatgactgatgaattaaacgcagttgatacaacgggcgtccccgtgacgactcacgtcaatggtttacaaaatgtcatgcgtgacgatatcgcacaaacgggtccaagtcgcgatgtcttgatgcaaaatgcaccagattcagccaacggtttattaaaagtacccgcaatcatggacaaggaggaagcttaatcttgaattatttatacgaagatttagagagcttacacgctaaactagtggctggtgaattaactgccagtcaattagtcactgaaacagtcgctcaaattgaaacgactgaccaacaagtcgatgcctttttacgggttgatgcagaaggcgcacaagccgctgccgctaaaattgatgaacaaccaatcgatgccgctaatttattagccggcatgccaattgggattaaagataacttattgacggacggcgttatcacgactgctgccagcaagatgttagcgaacttcaaacccgtttttgacgcaacggtcgttgaaaaattaaaagccaaagaagccatcatgattggtaaaaccaatttagatgaattcgcaatgggttcatcaactgaaacctccgcttttaaaaagactaagaatccttgggacttaacgaaagtgccgggtggttcttcaggtggttcagcggcggccgttgcttctggtgaagtcgttgcggcacttggaacggataccggtggttcaattcgccagcccgctgcttttaacgggattgtgggaatcaaaccaacatacggtcgtgtttcacgttggggcgcgattgcttttgcttcaagtttagaccaagtcggcgttttcagtcgcaacgtggcggataacgctacagttttggaagcgattagtgggcatgatgaaaaagatagtaccagtgccaacttgcctgttcccaattaccgggctgctctaaatggtgatattaagggcatgaagattgcggttgctaaagaatatatggctgaaggggttgaacccggcgttaaagcgcagattgaagcggcgattgaaaccttcaagtctttgggcgcaaccgtcgatgaagtcagcttgccacattcacaatatgcggtgcaaacttattacattatcgcttcaagtgaagcttcttcaaacttgtcacgttacgatggtattcgttatggttatcgttcaccagaagctaagaccttagaagaagtttacgtgaaatcacgttctgaaggctttggcgatgaagttaaacgacggatcatgctcgggacgttcgctttgtcatcaggtttctacgatgcttatttcaagaaagctggtcaaatgcggactttaattattcgtgattttgaacaagtttttgcggattatgatttagtagtcggccctacagcaccaacaacggcctttgaattaggcgataaagttactgatccagttacaatgtatatgaatgatattttaacgattccagcgaatatggctgggttaccagcgatgtcagtgccagctggttttgctgatgggatgccagttggtttacaaattattgggaaagcctttgatgaagaaactgtttatcgtgctggttatgcctttgaacaagccactgattttcatcaacaagttcctagttttaaaggaggccaagcctaatgaattttgaaacaaccattggtttagaagtccatatcgaattaaagactaactctaagatgtacagtccttcacccgtcaattacggtgccgaagccaatacgaataccaacgtgatcgactggggttatcccggaacgttgccaacgattaacaaaggcgcttatacgttagggatgatggtcgcaactgcgcttcacgccaacattgcccgggatacgcattttgatcgtaagaattatttctaccctgataatccgaaggcttatcaagtgacgcaatacgaacaaccattgggtcaagatggctatatcgaaattgacgttgatggccaacaaaagcaaattgggattgctgaactgcatattgaagaagatgccggtaaaaacacccatggcaccgatggctactcatacgtcgatttaaaccgtcaggggaccgctttaattgaaatcgtttcaaaacctgatatgacgacgcctgaagaagcctatgcttatcttgaaaccttacgtcaaatcgttcaatttacgggcgcttctgacgttaagatggaagaaggttcgatgcgggttgataccaacatttcgatccggccaatcggtgcgacgaagtatggtgttaagtctgaattgaaaaacttgaactcctttaaccacgttcgtttagggttagcttacgaaattaaacgccaagcagcacttttaattgccggcgaaacaatccggcctgaaacgcgtcgttttgatgaaaaatcaggcgaaacattcttgatgcgggttaaagaaggggccgatgattatcggtacttcccagaacccgatttaccaccaatgcacattagcgatgactggttacaagaagtgaccgatcatttacctgaaatgcctgctaaacgacgtgcccgctacgttgatgaattagatttaccagaatacgatgctggtattttaaccaacaccaaagaaatgtcagatttcttcgaagcggcagtcaatgatggcgcagcgcctaaacaagtttctaactggttgatgggtgaagtgaatgcctatttaaatgacaaacaaattgatttacaagaaacagccttaacaccagcacatttagctgaaatgattaatttaattaaagatggtgtgatttcttcgaagattgctaaaaaagtattccaagaaatcatccaaaatgatactgatccaaaagcttgggtggaagctaagggcatggtgcaattatcagatcctgcgcaattaaacccaatcatcaccggtattttagatgataatcaacaatcaattgatgatttcaaaaacgggaaagaccgggccgttggtttcttagtcggtaagattatgaaagaaacccgtggtcaagcaaatccgaaagtggtcaatgaattattgatggcagcattaaataaacgataatttaacgattgataggagattcatatgcaaaaacgggcacgattgatctataacccaacttctggccatgaagtcatgaaacgaagtgtggctgacattctagctattctagaacaagcgggttatgaagcgagtgcgtatcaaacaactgcagaaccagaatcagctaaacatgaagcaacacgggccgctaaagacggtttcgcgttggtcgtcgcggctggtggtgacggcacgattaatgaagtcgtcaacgggattgccggattagataaacgtcccatgatggcggtgattccagcggggacgactaacgattacgcgcgggcgcttaagataccgcgggataatccggttgatgcggctaaagtcattcttaaaaacgaaacgttgaagatggacatcgggcaagccaatgacaaatattttatgaacattgccggtgggggattcttaactgaactgacctatgaagtcccatctgattttaaatccatttttggttatttagcgtatatcgttaagggtgctgaaatgttaccccaaattaaaccgattaaaatgcatttggaatatgacgaaggggtttacgatggcgaagcctcattgttcctactcggtttaacgaattcggtcggtggttttgaacagattgcccctgacgcgcaattagatgatggcaacttctcattaatcgtcgttaagacggcgaatatggctgaactactgcacttgatggcgttagtcgttaaaggtgggaaacacgtcaacgatccacgggttatttataccaagacctctaaattagtcgcacgtccgattgaaagtgatcagatgatgattaatttggatggcgaatatggtggcgatgcgccaatgacgttcaccaacttacaacaacacattgaaatgtacgtgaataaagaagcgattccggatcacgcgattaccacggaaacgcctgaagaactacaagctgagaaccaatttgttaaggaagtcgaagaaatttcgaaagaagacatcgacggcgacggcaaaatagggtaaactagataattaacaatcgcagaagaatctggtatatgcaaaaggcttataccagattttttacacaatacaaaaagaggttactatgaaaattaatgcacctgttcgtaaaaatgaaacattaaccgttgatatcatggatttaacgtacgaaggaatgggcgttgccaaaattgacaactaccctttgtttatcgaaggcgttttacctgatgaacaagctgaaatcgaagtgataaaggtcaataaacaatacggttttgcccgcttagtcaagttattgaagaagagccccgaccgtgttgaatctaaagcaaatgtttactcacaaactgggattgcgccattacaacatttggcttacccagcccaattagacttcaaacggaatcaagttttgaacgtcttccaaaaagctcatttagaaatcccagttgaacctgttctagggatggaaaatccaactggctaccggaataaagcgcaagtgcctgttcgttttatcgatggtcacttgatgaccggtttctatcggaaacacagtcaccaagtgatgccaatggaagatttctacattcaggatcctaaaattgatgaagcgattaaagttgtttgtgatatcttacgtcgtttctacatcgatccttacaatgaagatacacataagggtgttttgaaaaccatcatggttcgtcgcggttattacagccacgaaatgatgatcgttttcatcacccggagcaaacgattgccagccgctcgcgaaattgcgattgaaatcaaaaaagcattaccagaagttgttagtatcatgcaaaacgtcaatgccgctcaaacgaacgttatttttggggatgaaacgaaattaatcgctggtcgcgactttattcgcgatgaattaatgggcttgaaatttgaaatttcaacgcaatcattctaccaagttaatccacttcaaacagaagttctttatcaaaaggccattgaagccgctgaattaacgggtaacgaaaccgtgattgatgcttattcaggaatcgggacgatttcattagccgttgcgaagcatgcgaagaaggtttacggtgtcgaagtcgttgaatcagccgtcttagatgcccgccacaatgctaaaatcaacgagattgacaatgttgaatttacattaggcaaagctgaagaagtcatggctcaatggcaagcagacgacctaaaagtcgatgctttaattgttgacccaccacgtaaaggcttggaaagcagctttatcgacgctgtcggcgaattaaaacccgctaagatggtttacgtcagctgtaacccagcaaccttagcgcgtgatttagagctattagcagcgcaaggctaccatgctgaatggacacaaccagtcgacatgttcccacaaacgttacatgtcgaatcagtgactaaattagtccgtcaataatcaaataacgaagtaaacaccttaatcgattgtcgattaaggtgttttttattttctttagaaaaatcggctgaatggtttaaaacgtcaaatgatgacagttagatttgatagactacgtttattaaatatagataaggagcggataaatcatggccatcagcagcaatcaacgagtacttgaagttattttgcgaatgctgaaaggtgaaaccgtcacatttgacacttggcagcatcattacgaagatggcaaatcaaaacggacttttcaacgagatatgcgcgacatcacggcagctttaaccgaaaccgattttaaatataatttggtccgaaaacaggtccgaccacagttgctgactgaaacaacccagtataatctggtgagcgaaatgacggcgaatcgattaacagatgcgattgcaattggtcagattgtgattgccagtcgagcgttgcctagggctgaattgaccaaattactcaccactttggtgcaaggtttgttaccaatcgatcgggatcaatttaaacaagccgttcaaatggcgcaacaaagttatttgccgttagctaatcatcccgttattttagaacgaatggctcaaattctgacggcgattgccgaacatcaacggctgacgtttgattatcagactggtgagattggggatcccgttaaacagcatgtcgcgcaaccagaaacgttatttttcgataatgcttatttttatgtggcgatgtgtcgagagcatcaaaccaagtatttactgtatcgtttggatcgaattgttgatatcacggccgtccatgcaggtgattgtcatcgaaagatgaatcattattcgttgcaagattatcgaaaacagacctatttattagcgatgggtgatttaacgacttttaggtttaaatgtcggattaaccctcagactgccttggaccggtttccagaatcaaaaatgattcgtcaaacaggggacaatgaggtcttaattgaagcccgagcttatgaagacggcgctatgttgtggttgttgggtcaaggtgcgaatattgaggtggtctcgccaacatcatttgtcccaaaatttcgcgctaatttagtggctacacttgaacaatattaagattatcaattgaagaaataaaagaggagtgttttaaaatggcagattggattcaagcaattggggttgttatttcattattaatcgcgggtattcgctattatcaaatcaaacggagtgccgcgttagaatcagttaagcaaatgttgaatttgttagatgagtttgatattttattggatgataattttcggtttaaggtttctgaaagtgtcgtgactgataaaaaagaaatgattgctgattatcaatatatgcaacaagaagttatcacttatgaagctgaatttagaaatgatttaaaagagttatggcggaacatgagcgccgcgagtttcgtgatgtttaatcgggaagctaaggggaatacagccaattctgtaagtgatacgttaaataatgcagcggttgttcaacggcaacttaagaatgttttacatgccgtccaacagaatgaaatgggtgatattcaaaagactaagaatatggctgccaaatccctattagtttttgccaaggacttaacccagctagccgttaaagaaaaattagtacacgacggcgaaacgcttagccagctatattcatctttggcttattacgttggtcctaatcgggaaattattaagttgattgaaaaatatttggatcaggaaaagaaatccgtcacaacgatcactgaattgtacgatgcgaaatctgatgagattaaaaaaacattaccaattacaccggttcaaaaacagttatatcaagctgtttatacacaaaaaaatcactatatcaaagtagacagtgaaaaatataaagaacaaagggaagaacacgattgtaaagcgctaattcgtaatgctgcaaaaagttattacttgattggacagaaaagtggtctccaagtcagtcggaaagggaatagttttatttttgaaaaagaaattaaaacacctaaaaaagctaaaaaggtcagtaaagaataatcgttaatggttagcgcgatcgatgattagtttgaacagattaaattgttaccaactgattgtgcttctcagttaagatttgtggtagtcttatttttgaagagaaatgtcaacgccaaaattatgtaataatcggttgaaaatatctgtatagggtagtagaatttattaaagacacaatatgttgtgtcttttttatttggaggctactaacgatgacaattgaagcaacagttaatattgataaattgaaccaagatattcaacaatttccagtgatttttccgattacgcctaacatgcagatgacgttcgacgggatttcacggatgattatgctcgatcgctatgcttataaagatattagtggcgaaacaatcacggtcggtgatttagtggtgctgaccacgaatccggatccgacttatccaaccaaggggttagggtttgtgaccgccatcgaaggggatcaattaacgattgaggtcaccccagattatcggagtagtttgactgattctcaagaagctgcgactggtctagtgatgcgcgaacgtttagcggttgaaaaaccgttagaattattctacgaacaaattgccaaacgggtttcaaccgaaatggcgcgccaagaaacaaaacaccaagagcagacgcaacaaacgttctacaaattattgttaaatcaagatttaatcccggctggtcgagtgttatacggttctggcacacagtcgcaagcgacttattttaattgttatgtgatgccatttatcgcggattcgcgcgaaggtttagccaaacaccgacaagaagtcatggaaattatgagtcgcggtggcggagtcgggacgaacggatcaacattgcggccgaaggatacgattgtccggggtgtcaacggtaaatcgtccggcgccgtatcgtggttaaatgatttagccaatttaacccaattggtccagcaaggtggcagtcggcgtggtgcacaaatgattatgatggcggattggcatcccgatatttttgaatttattttatcaaagatgcaaaatccagatgtcttgcgtaaaattcaagcggaaaatacgaatccgattatcaaacaattgattgatgaaaaattagttttcacgccacttgatccagccgaaaaagaatacactgaattcctattggccaagaaaactgatttaccagcggaacaaatccaacggctccaacaaaaattaaccttaaatggaacttacgatgtgcgcgataaggactttttatccggcgccaatatctcggtctgcatcactaaagaattcatggacgcggtgattagcgatggcgactatcaattacgctttcctgatgtggcccattacgatcaagccgaaatgcaggtttatgatacgcaatggcaagactgtggcgatgtgcgcgaatgggtggcgcaaggccacgcggtgcatgtttatcaaaccataaaagcacgccaattgtgggatttgatcacgacttgtgcgacttattcagcagaacccgggattttcttcatcgacaatgccaatgcaatgaccaatgcgacggcttacggtcaaaaggtggttgcgacaaatccgtgtggtgaacagccgctaacaccctattcggtctgtaatttagcgtcaatcaatttggccaacatggtgaacaaacaaacacaaaccgtcgatttcgagaaattagcgcaaaccgtgaagaatagtgtgcggttccaagataacgtgattgatgcgacgccgtatttcttcgataaaaatgaaattcaagcgaagcatgaacgccgggttggtttgggtgtgatgggcttagcggacttgttgattgattgtggtcaaaagtacggttctagccaaggcaatcgattaattgatcaagttttcgaaaaaattgcggtcacagcctatgaaacctcggttgaattagcgaaagaaaaaggcagtttcccattcttagtcggtaagactgaagccgagacaagcgcattacgccaacgctttatcgaaaccggttatatgcggcaaatgccagaaacattgaaagctgatattttaaaatatgggattcgaaattcgcatctcttaaccgtcgcaccaacgggatcaacgggaacgatggtcggtgtttcaactggtcttgaaccttacttctcattttcgtatttcagaagtgggcggctcggtaagtttatcgaagttaacgcccagattgtcgaagattatttggcccaacatccggaagctaatgtgcaacatttacctgattattttgtctcggcgatgtccttatcaccagaagcgcacgtcagcgtgcaatgcacgattcaacgctgggtcgatagttcgatttctaaaacagttaacgcaccacgcggttaccgggttgatcaagtctcggatatttacaaggcgctctactttggtggggctaaagggggtacggtctacgtcgatggcagtcgcgattcacaagttctaattttaaaagacgacgatcaagcaaaggcggataagcaaacgacgacagcgcctgaattgccagtcgtggacgaaaatgacccactcgcaatcggcaacccatgtccaatctgtaaaaaaggcaccatccaagaaataggcggttgcagcacctgcacaaattgcggcatccaactaaagtgcggattataaaactgagcgctgagacacacggttaggttctgagcattagcctagtctggtgaatgaagtccgagttgtgggctttgttcaccagacgtagctaagcggaagagcttgtgtgtagaagcgtgttaaaagaaaataagcgctgattcgaacgggtaggctttgaggattaacctaaggatgcgaattatggttggttttaaccataatttgaatcctttagttaaccggaaaaggctgttcgagaagcgcgttaaagaaatgagtgtgttgcgttgcggttagcaattgagcattaacagaaaatcgccggttatcttgaacttaagataattggcgattttaggttaagcggaagttgttgcaacgcagaagcacgttacccgtgcaaatcccccgcacttccgctagaataaagccaaggtatatcgagggttaggaagttggggaaaccatggttaataatgattggttagttcattggatattgcgtttgcggcaacacggtttataccaagttttgcagaaaagtttaatgttattatttccgtttgtgttagtcggtagtttaagccaggtgattcaattaacggtgttaaatcgtgatagttttttagcgaccatttttaattggtcaacgtggctgggcaaacaccaatttttggcaattatttttaaccatttaacggggctcacgttggggattgtcgccgcgctggccgcattcagtatggcgcgctatacggccaagtattatgcgcgggatgaacaactggcgggactgaccggtttgttagcctatttaatgttggcggtccgctacacggccaacaatgaattgacgtttacgcaaggcatgttgggtatgggtggcctgtttatggggctattagtcggttatttagtcggtttcgcgttcaaaaaattggcccatcagcaacggcaaacgccggttttagcggaggcgactttgagccggacccttgattcaatcggcgcgattattttagtattaagtatcgctgtcttgttgagtttattgttgaattggttggcgatttcggtgttaccggatcaagtgattttaaaactacaatcggtgaatgccaaccaagcgaccttgccgtttacgttgggcgtgactctgttggcaagtgtcctgacgttctttggtttaacgagcatgccgacattagcgcagttcggacgagacgggattgcgaccaatgctaatttgaattatgccttggcacaccattcaatttggaatgtgccttatccgttttcattaggcacgctttatgaaccgtttggcgccattgggggcaccggtggcacgttggcattgatcattgccatcttcttatttagccaccaaaccaatcaacacctgattagccggtggtccttattgccggtcttatttaactttaatagcacggtgttagtcgggttaccgattctagggaacggtttatacctcatcccgtttctattagtgcccttagtcaacatgggcgtggcggcactagcgattgcgtggcacttaataccggcagttgtgtataacgtgccgttggggacgcctagcttattgcaggcgtttgtcgggacgaatggcaactggggcgcgctggtagtcgtcttgttgaatattgtgattggcgtgctgatttatcggccgtttgttcaatgcgctaatcggttaaatgaacaagggggtggccgtgatgtcaaaaacgattaaaaaatggagtttaatttgtttattagtgggggtaatcggcgtaggtgcgctactttggccagctgcgaagtggacgcatcaaaatgtgaccacgttagccaaacgacatgattcacggatgtccccggtgatttttattccgggcagtagtgcgactcaaaatcggtttgatcagttagtgaccaagctcaataccaaacggggtaatcggcacagtcttttgaaattgacggtgcataccgataataagattagttattcaggctcaatccgctcgggtgataatgaacccttcatcgtcgtggggtttgaaaataataaagatggttacagcaatattaagaaacaggcgaagtggttttcaatcgcctttaacgaactcgccaaacgatatcagtttaataattttaaagcgattggccattccaacggcgggctgatctatacggcgtttttagagaattattttgaccgcgatgatattacggttaagaaactgatgacgatcggctcaccgtataattttagtgaaacgtcattagcgcacaagtcacaaatgttgactgattttattaaaaatcgtgaaaagataccaaccaactttgcgatgtattcaattgcggggactgaaaattacgaaaatgatgggattgtgcccgcgcgcagtgtggaagccggtaaatatatttatcaaggtcaggctaagagttataccgaaattacggtaaccggtgataatgcgcaacattcagatttaccgcaaaatcagcagattattagtctgattgaacaatacgtgttgactaaaacgacgaatcgcaatcaaccgccacgaactggtacgcagaacaatgaatcaacggaatagtggcacaaaaaagcaacgacgaattttttaattcgtcgttgctttttttagcgtttagatcataacgtgcttacttttctttaacgcgcttctcagctagcttcttccgtctagctacaaatctgacattatgactaaagacccagtcataatgtcagattctaggctatactcagaagctgaacagatgagtcagcgctcattttctttaacgcgcttctcgagtagccttttccggttaactacgacacgggcattatgagtaaaaaccactcataacacccatgtctaggttaatcctcaaagcctgaccaacttgagtcagcgctcattttcatttaacgtgtttttgagttgcaacaacttccgcttaacctaaaatcccccaattatcttaaaatcaagataattgggggattttctgttaatgcccagttgctacccgcaactcaacgcacttacttatttgacgcgcttctcgagtagccttttccggttaactacgacatgggcattatgagtaaaaatcactcataacgtccatgtctaggttaatcctcaaagcctgaccaactcgagtcagcgctcattttcatttaacgcgcttctacacacaggttcctgcgcttagctacgtctggtaaataaagtccataaaccggattttattcaccagactaggctaatgctcagaacctattcgtgtgtctcagcgctcattttcctttaacgtgcttttgagttgcaacaacttccgcttaacctaaaataccaattatcttaagttcgagataactggtattttctgttaatgctcagttgctacccgcaactcaacgcacttacttatttcgtttgatcttttaagagttggccaatggctggtaaagtgcctaggctgtcgatcgatttgttaggtaagacaatcgtgttattctggccagctgcgacgtgttccatcgcttcaatattcttgaattgtaaataaagttcaccgttgttgaccaaactagaattgatcaaattaatttgatccttaaccgcttcggcaacggtccgttgactttgggctttcccttctgcttccaaaatctgtgtttgtttgttggcctcggcttcaaggatgttagcttccttaaccccttcggctttacgaatcgcagcggctttcaaaccttctgcttccataatattggcttctttttcacgagaagcccggagtaatttgttcattgaatcttgaatgtcatgcgcgacttggatcgaatcgatgttgacccgatcgacgttcaaaccgtaaccggctgtcacttcgctcagttgttcaaagagggtgtggttaatctgttcggtaccgtttaagacatcgttcaaatccatgttgccaatgatcccccgaagttgtgcgcgggtgtcttggaccatacttaaaacggaatctttatttttataaacgtatgagttaacgtcggtaatgtggtatttcaatgtttctgaaatcatgacgacgacgttatctttggtaatcacttcttgttcagcaacctttaatggaatctgtttcatgttgacgatttccgtgatgtggtataaaaatggaatcacaatgtgaaagccgggttccaacgttttaacgtaaaccccaagccgttctagaatcccaacttccccagtgtgaatcaaagcgaatgatgaaaacagtgtgatggcgactaagactaaaataacaattaataagatggttaagaaaatgcccatgataaaaccccttctctaaaaataatttaataatctaaaacagcttggtgtgctgttacgactaagtatagcggtgtgacagccgtgacttcaactaaaagacccgctgaaggttcacccgtaacttgatagtggtacaacacgccgaaaaaagcgattgtgccagttggtttgtcatctggtaatgagaatcgttggcctagtaaccgatcatcgagcatataacgcctccttgaccatattgtagctgattctagtgaaaacgcaaacaaataaagcaggcgacgaacaaaactgttaggttacttgttgaaatcgagtatcaatagtaaactgaaagatattacgatgaaaatggtgaacagtcatgggacaaaggttcaaaccgatctttcaagatagttttcaaaaacattattggcgcaaaataggcctgattgtttgtctgttaatcatattggcaggcgggctaagttggtggttttggcaacgtacggatcgccccaacgttaatcagtacccagtgttaggcttaaaagtcagtcaggaagatggttatcaggattttcaaaagttaaaaaaagaagacgttcaattcgtctacctaaaggcgaccgagggtgcgagttataaagacgattattttgacagtaattatagtcgggcggttggttcagggctgcaagtcggcatctatcattattttagcttcaacagtaccccggaacagcaagcggcgcagctctttaaatcggtgggccaagatagcggcaacttaccaatcatgatttatctcgaatattacggccaatatcaacagaaaaaaccggcgaccaagaaaacgcaaaaggcggtcgctcaactcattgcgttaattaatcaacattatcaaaaagattgtctactgggcggaaccccagcaatcgttaaccgctaccggccagctaaggggcaatatccattgtggcaaacaacaagtgctgcccctaaagcaatgcaaaccagtggcttttggcaatacacgttagccagtccgttaccgcaacaagatcgacaagcaacttatcaattggcggtctttacgggaaccaaagcccaatggcgccaagttcagaaaggaaccttttaatgaatcaattgaatcgtttatttagacgcaaaggctggtggttattaaccgccatcgtcctttttttcatcggtggcagttggggcatctaccaacaatattatagcggtaagatgtactacacccagattacgacggttggtcagaaaaaagttgaacaagacgatcaaggtgaaaaccacgtcagttatcaatatcaacaaaaagcgtatgatgaccaaggccgcctaaaaaaagtggatttcaacggtgttaaatcaacgccattaaagcatcaagcttaccttcaattaagagtcaattcactaaaaggcgtcgtttcatggcaaaaagtcgatcgaaatgaagtcccaagaaaggcgttaaaaaaactgagcgctgactcagccgattaactagcataactaaaaaaatcccaatctcattttttgagattgggacttctttagttatgtatcctcatttattcgattggataatcagtatcttcagcttcatcataaattgaaacgggatgttgatcttcgcaggtaatttttaattggtaaccaaaatggtctaaaaaaatcaattcatcttcggtcaattgaatgacgttaccggagagcggtttattatcaatttggacgaggaggttaggcgtaatcttcaacgtgtgtgtcttatgggtttgttcgtcgttaaaagaccaattaccggcataaaaacttgcaactttactggcttgagcagttcgcactttttgctgatattggtgaatggtctgttcaaaaagttcctttggttttttaaaacgaaaaattctcataatcacacctcaatatagttctattttagcacgaatgactttctttttgtggatattgttctcggacttaaggttgatttttcaataaaatattttgtaaacgttttgatgggatttcagacctatttcccgtatactgaacttacttaaatgaggagttgaatgtcatgcaaaaattaggcattattgggaccaattggattacgggacagttcgtggaagcggcccgaacagctgaagcgtttgaattaactgcagtctattcacggactgctgccaaagcccaacaatttagaaccgactatgaagcaggtgcggcacaagattataccgatctcgccacttttttcatcgcgggtgattttgcgaccgtctatattgcgtctcccaacagcttgcattttgaacaagctaaacaggcacttgaagcgggcaaaaatgtgatcgttgaaaagccagccttcagtaatccgactgaaatggcgacgattcaagcgatacttaaagatcgacctgatcaatttttatttgaagcagcgcgccatgtgcatgaagccaatttcaaaattgcgcaagcagcgattcaaaacttgccaacaatcaatggtgcgacattggcctacatgaaatattcatcccgttacgatgccgttttagccggggaagaaccaaatattttctcgcgtcatttttcaggtggggcgttgcaagatttaggcgtctatgtggtttacgatgcggtcagctggtttggcgctcctgaatctgttgattatcaagctgaaattttgccaaccggtgtcgatggtaaaggcgttgcgaccttgcattacgctgattttgatgtcacgttgatcttcggtaagacggttgattcttatttgaattccgaaatttatagcggtcaaacgacgattgtgttggataatgcgggtacgattggcacggtcagtcgttacgaaaatgacggcgcgcaaaaaacggctttaggccaagcgccacttgccaatccgatggtggccgaagcgacaatttttgctgagattattgctaatcgcgacacaaaacggtatcatgaactattacaactcagtcaaacagtcaatcaggtcgtctaccaattacgtcaatctgctggcattgtgtttgatgcagattaacggaggcaatacatgagcgtttcaccagcatttcaagcattatgggacgaacaaggttttaaagaacaatcgcccattcaactagccgttgaacaaccattaaaaaatgatcgatcaatcctgggcctagcaccaaccggttctgggaaaacgctagctttttcattacctttattagagaaggtaatgcctggcgaaggcttacaaatcttaattttggcgccatcccaagaactcgtgattcaaacccgggatgtgattctaccttacgctaaagcgattgactgtaaagtgcaggcgattacgggtaaagccaacgttaaacggcaaatcgaacggttgaaagaaaaacccgagattatcgtcgcaacgacgggccgtttattagaattaaacgaacaacgcaaaattaaattctatggcttacaagcaattgtcatggatgaagccgatgagttgttgactgataatggtttaaccgaaacccgccacattgtgcaggaatcacctgccgatgtccaattaggcttcttttcagcgacttcaactgaaattttaacggaattagaaaaatggtttggcgtcgaagttgaaacgattgatgtccgcgatgtcgatcggaccggtggcgaagtactccacgccttcattccaaccggcaatgcccaaaaagtgaatgtcttgcgacatttagcccatcaaaaacacttccgcggtttggtcatttttaaccaatcagcccaattattacaagcggcgcggactttaggccatcaaaaagtgacttacgcgtcactttctggtcaaggtcggcaaacagaacgtcaaaaggccttaaaagatttccgcgaaaataagattcaactcttattggcgacggacgttgcgggtcggggattggatatcactgatttaccatacgtgattaattttgacgtgccgaatgctaagattacttacattcatcgggccggtcggactggtcggatgggtcgtgaaggcacggtcttaacgttgggtaaccaacatgatggccgtaatttacggaagttattagcgcctgaatatgatttagtcacgcgttatttagtgggcgatcatttggaagaaacgcgcccagtagcgcctaaaccagaacccattcaaaaggaacaagttactgaaaaaataacagatggtactgaaaaagtagcggtcagcgttacgaaaacagatgcgcctaaacaaccggtaaaacggccgaatccggttaaaccaagtcgggtacaacctgagaatttaaagccaaaacacaagaagaatcgcaatcgtaaccaaaagaacaaaggttatcacaaaaaaaatatcgactaacggtctagacctaaaagccctaaaatcattgtaaatgattaggactttttttaattggcctagctgttaaataacaaatattgacggaattaattgacaaaatttttgaagcggttacaataagagtatcagttttaattggctagactttctgattggtacgtttaaggattaacagagtggttatttttgtaagccctttaaagacttgataggaataattgactagcattggcatcatcagagaaatcgaggaggattttataatggcagaagaacaaaatttagaagcaatcatgggtttaattatcaacggcgggaacgctaaaagcagctcaatggaagcaatccaagccgctaaaaaaggcgattttgaaacagccgccgctaaattaaaagaagctgatgcagcactttctgaagcacacaattcacaaactggcatgttaacgaaagaagctagtggcgaccatattgaagtgactttattaacggttcattcacaagatcatttaatgaatgcgattactttccgcgatttagctggcgaagtggttgacgtttaccgtaaaatggctggccttgaagttcatacttattaaacgaaataattaaatcggggttggctgaattgtcagccaatccttttttcttaaaaggagattagcagatgatatttctaaatgcccccattcaacaagagcaaattattgcattgcttgatgggtataaccaagatggtgtcacgttcaagtacgtcaaaaaagaagcaccaatgaaattattgtttgaaaccaaccagactgacttagaagcagccgttaaggtagctaaggcgaccattaaagcccaatcatggggcgctgtcttattcttccaagcaggggttgttcaataatttcagaaatttaaatcagatgaggtgattatcaatggaaattaaacaaacgttaaatatcccagctagttatttttatcaaaaagtcattgattctgtgttatttgatattcgcaaacaaacgggccagacgatgacggctgcgcaattaatgaattatgcgtacgataaaagttttggcaacaatggcaaagcaacgattaaggtcactcagttgattaaagatcaaagctaccattatgaaacaagttcgccccggggaacctatcaagcgagttatgatatttttgccaacaatgccgattcaattcaagttatctatcgcgaaagcgccaaagccagcggtaaattacaacaagccaacgacgccttcatgggtgtcatcatgggcttcatgcgcaaacgcggtttcaaaaaaatgctaaaacagattgaaaaatcgtacacagaatagagcgcttttgcttacggtagattctgagcattagcctagttccgtgaataaagtccgggctatggactttgtttacgaaacgtagctaagcacaggaatctgtaaggaaaagcgcgtttaaaaaaagagcgctgactgagctggtcagcttctgagtatagcctagattagtgaattatgaccggtttttggtcatagtttactaatcgtagctagacggaagaagctagctcagaagcgcgtctccgcctttacaaatcattttgaaagtgagcaaattaagatggaatatcctaaattagcacctttccccactaattttttgtgggggtcagcatcagcagcgtatcaaatcgaaggggcttatcaggccgaaggaaaagggttatcagtctgggatcagtttgtacggattccgggaaagacgtttaaaaagacaaatggcgacgttgcggttgatcattttcaccggtatcgtgaagatgtcgctttgatggccaaagccggtttaaaagcgtatcgtttctcaatctcttggcctcgagtcttgccaactggtcgtgggacggttaatgaagctggcattaaattttatagccagttgattgacgaactgttagccaatcacattgaaccaattgtcacgatttatcattgggatttaccgcaagcgctccaagatgaatacggtggctgggaatcacgtcagatagtcgatgattttacagcgtatgcgcagttattattcgaacgttttggtgatcgagtcagtcattgggtcactttgaatgaacaaaatgtgtttattacccacggctatttaacggcggagcatccgccagcagtgatggacgctaaacggacttatcaagccaatcacatggctaatttggccaatgcgagtgcgattaaattattccacgaaaaagggtatcaaggcggtattggacctagttttgcctacagcccaacctattcgttagatgcaaatccggttaaccaggtggctgcggacaatgcggaacaattgagcgctgacttatggttagacgtttacgcgtggggccgttatccagccctagtgatgacttatctgaaaaaccaaggaattgcccctgaagtcacagaagccgaccaagcgttactgagtgacccattagcgcatcctgattttatggggatgaattattatcaaacgaatacggtaacggcgaattcgctagaagatggtgttggtttgacgaaacagaatacatctggtaaaaagggaacaagtcaagctagtggcgtgcctggcgcttataagacggctgagaatccgtacatgcaacaaaccgattgggattggaatattgatcctgaaggtttgcgaatcgcgttacgccggattgaaagtcgctatcacctaccagttctgattactgaaaacggattgggtgcttatgacacgcttgaaactgacggtgaaattcatgatacttatcggattgcattcttgaaagcccatgttcaagcgattcaagaagccattaccgatggcgttcgcgttatcggttatacgacttggagttttaccgatttattaagttggacgaacggttatcaaaaacggtacggttttgtttacgtcgatcgcgacgaaacggatgaaaaagaattgaaccggtatcctaaggatagtttctattggtatcaaaaagtgattcaaagtaacggtgaaataatttaaactagacaagctatgccattttttgggatagcttttttagtcgatgacgcttaaaataagcactaactaaattaacggaggcgtaaatatgacaactcaagaaagacgtgcggccgtcttagccgctattcaggatagttcgcaaccgattagcgctaaaacgttggccaagcaatacgaagtgagtcgtcaaacaattgtgggtgatattgcgttacttcgcgcacagggggccaacgtgattgcgacggtcagcggttattatattcagacggtccaacaacggcaacaatattaccgtggtcaagttgtttgccaacatacgcccgccaaaacgcgtgctgaattgctggtaattgttaaaaatgggggtcgagtcgtcgatgtgacggtggatcatcccttatacggtgaattaacgggtcaattagggattgcgaccttgacagatgtcaaccaatttatgcaaaaaataaaagccaatccacaacaacggttattagcaacgctaaccgatggggttcatttgcatacgatagaatgtgcatcagaacaggattttgaacggatattaacggcgctatcagaacttggtgtgcgttacgaaaaataaataggtgtcttgacacgtgtctggtttttccgtatgataatgcctgtagtcacataaaagggtatggataaggggaatgacagatgcaaaaagaacacaggacattattatgggcagcaggtggggcttggttatttgatgcaatggacgttggtttactctctttcgtcatcgcggccttagcgaaagaatggcaactgaatagtagccagatgggtctgattggcagtatcagttcagtcggaatggcaattggcgccgttgtttttgggattctagcagataaaattggacgcaagaatagtttattatgttcgttattgttattttcaattggtaatgggatttcggcttttagtacctcattgagtttatttttagttttacggttattagtcggtgccggccttggtggggaattaccagtggcgtcaactttgatttctgaaaacacgccggccgaaacacggggccgtgcagtggtcttattggaaagtttttgggcggctggttggttagtcgcaagtttactagcttactttgtaattccaacgtggggttggcgagtggtcttgttgatcacatcgttacctgctgtttacacgttgatcttgcggaaacatattaaacaggaacacgaaccgcagttaattaaccggaaaattccgttagggcaacgtttagcaaccctttggtcagaaacgtatcgccgcagaaccatcatgttgtggttggtttggttcttagttgtcttttcatattacgggatgtttttatggctaccaagtgtcatggtgctaaaaggattcagtttagtgcacagctttgaatacgtcttaatcatgaccttagcacagttacccggctatttcgttgccgcatggttgattgaaaagtggggccgtaaattggtgcttgggactttcttaattgggaccgcagtcagcgcgttagcttttgggacggcgaatagtgtcgggttattaattttagccggggcgttattatccttcttcaatttaggggcttggggcgcgctgtatgcttatacaccagaacaatacccaacagccgtccgtggtagcggcagtggcttagcggccgctgtcggccgaattggcgggattgttggacctttgatggttgggaccttaatcggccgtcaagttagcttaccgattatttttggcatcttcacggccgcgattttaatcgctgcgggagctgttttaaccttaggggaagaaacgatgcaccaagctttaaatcaataacagattgaataaatcgactttacaattaatcccttgaatgcgacaatattatttgtagcgttctcgtggctcaactggatagagcaatcgcctcctaagcgataggttgccagttcgattctggccggggacattggtaatagccgattttagcatcaagaaggtctgagtgaattcactcagcctttttttgcgaaataattggttacgttttcattttcagaaagttagcaaagttgattcttatttgctaaaaatatgttaaaatagattcgtattcaaaaatcgcaacttcaaaaagttgcaattaatctggaggctttttcatgtcattagttaatggtacagaaattttcaaagctgctcgtgaaggtcattacgctgttggtgcattcaacacaaacaaccttgaatggacacgcgctatcttggctgcaggtcaagaaacaaacacacctatcttgatccaaacatcaatgggtgctgctaaatatatgggcggttacgaattatgcttaaacttagttgaacaaactgttaaagcaatgaacatcactgttcccgttatcatgcatttagatcacggtaactacgaagctgctaaagaatgtatcgaagttggttacaactcagttatgtttgatggtcatgatttaccatttgcagaaaacttagaaaagacaaaagaaatcgttgctttagcacatgctaaaggcatctcagttgaagccgaagttggttcaattggcggtgaagaagacggtatcgttggcgctggcgaattagctgacgttgaagaagctaaacaattagcagctgctggtcctgattatttagcagttggtattggtaatattcatggtgtataccctgctaactggaaaggcttaagcttcgaacgtcttgaagaattagctgcagttatcaagattcctttagtattacacggtggttcaggtattcctaaggaacaaatcatcaaagctatctcaatgggtatttcaaaagttaacgttaatactgaatgtcaattagtatttgctaaagcaactcgcgaatatatccaagctggcaaagatcaacaaggtaaaggctttgatcctcgtaagttatttgcacctggtactcaagctattactgatcttgttaaagaacgtatcgaatggttcagtacgccagaagttaaataatcaaattaaattcaaagtccaacttcggttgggctttttttgttgtttaagtcatcaaaaaaagctaatcatcaagattttcttgagattagctaggtttagaattgattgcagattagccgattgcgctgccaatcagataggtgacgaacatcgttaacagaccgattgagacgttccgtaaaataccttttaaacggttagcgtggccgagcgaggcactggtaaaaccagtcataattagcgctagaatgaccgcgctaatcgtgccgctgactttatagggataaggaatcaacgtaatcgccagtagcggtaagagcgcgccaaacatgaatgagaagaaggatgaaaaggcggcgtgccacgggttgaaatagtggtggagttcaatgttgtatttttcacgtaagatgatgtccaaactatctttttgcataaaagcgtttgcgacttggctggcaagtggtgtgggtaaccctttagattcataagtccgggttaaactagcgacttcatcagcgtattcattttggatggcttccttttgcaggcgcatcattgatttttgagtatcacgttgggtactaaccgaaacgtattcaccgccacccattgaaaaggcgcccgcaagcatgccagaaacgccggctaaaaagagggtgtattgactctgatgagcactggcaacgccgacgacaatcccggcgacggagataataccgtcgttggcgcctaagacgcccgcgcgaataatattcaaacgttcagataaacaaagatgcgggtttagtggtttggtagtcgtgatttctttcatcagataattgctcctaacatgataagtttaattatattatacctaattgagaaacgttatcaattgatttaacgaaattcgtcacaaagaaatcatcgtgtaaaattaattaaccaattagtttttaatgattcttaataagcacaaaaaaaccggtatcgacgtaagtctcaacattctgagattaaatgaacatttttctttgacgcgcgccagaactcatcaatttccgttcaaatcaaaataactgattatcctaagttcgggataatcagttatttcaacttgatactcaattgataaccgagttctgtcacagcttgttctatttataactggggttgttggagggcctggttaaaaaagtaataacaaataatcacagccaacaaaccaatcagcgaaatcaggatcaatcccttaatattttgccgttgccaaccactatagattgtcagaccaatgaaaaaagtggtcaaacaaacggcgatacctaaaagcatgagccaaactatcattgattaatccgcccaatcaccattccggaagactgggacgactgaaccgtcgtgtttgataccgtcaatgttcatttgactagagccaaccatgaaatcaacgtgggcttgactacggttcaagccagccgcttttaattgttcctcggtcatcttagtgcccccttcaatggagaaggcgtaagcagaacctaaagcaagatggttagatgcgttttcatcaaatagtgtgttgaagaacgtaatcttagattgtgagattggtgaaggatcaggaactaaagccacttcgcctaaactcttaacacccgcgtcagtttgcaataatttttgtagcacatcgttgccttcttcagcagtcgctttaatgacgcgaccattttcaaaagtgaatttcatgttatttaacgtattacccgcatagctgagcggtttggtcgaagagatataaccattaatgttgttcgcatcggcagctgagaagacttcttcagttggcatgttggccacgaatggccgtccatcgctactttcattaggaccaccaatccagatatgattttcagggagaccgattgtaatatcagtaccaggcgcagtgtagtggagtgctttgaattgggcagcgtttaattcagcagccttggcttggagtttatggccgtgagcttcccaagccttaattggatcagcttggtcaatccgagtggtcttaaagatttcagtccataatttatcagtggctgtttgtaaatcatcgtctgggaaaactttgtgcgcccaggcgggactagcagcagcgatgacaatccagctatttttgttggcttgtgtcgcttggcggactttaagcatggcttggccgtttgctttttgaacggcagcgacccgatcgctatctaagccttttaagttgtcgggattactcgacatgactgaaattcgtttagcgccgtgttctagccaataatcgtattcttgtgtttggaagtcggggacattcagtaaccgatcttcatccttgtgttgcatattgaggcgatcaactaaatcatcttgccatttaataatgacttcagcggcaccgagatcgtaacaagctgcggtaatatcgcgggccaattgtgattgcgtgactgcgatttggatgacgatggtgtcaccggattggacattaatcccagttttggcagttaatgccgcgtatttttcaagattgtgttcaaaagttgtcataaaaaatcctccttaaatgcttttaatacgttcatcatagcataagccgtctaaaaaaacttgcaatatcagttaaaacgttttcattgttatttaatttgtgttagagttactgtaatgaacggcgtaaactgaaattttgaggggttgttaagatggcacgaaaaaagcgaattaaagcggaacaaattttggataaagcgtatgaaatggtgttgaccgatggcttgaaatcaatcacggcgcgtaagttagccaccgagttagactgttcaacgcaaccgatttatttggaatttgggagcatggaccatcttaagaatgctgttttagaagaagccaaggcgcgcctgatttggtacgtcagtgaagagcaacggaccgataatccgttggttaacttgggaatgggctatatgcggtttgcaactattgaaccacagttgtatcgagcgttatttattgataaccattttggtgaagataagacgaaatcgttcgtcagccaactagcgactcaggcccttcgtaaatacgagccactgatgaataaacccgaagcagagcgtaaacgaattagtgtcgaaacgggtgtgattatcgcggggattgcgacgttattgaacacgagcttggtatcactatctgaagatgaagtctatgcattattgacacggatgttgaaacgttgtttagaaggcgaaccagtgacaaattaaaagagaagtccatccgaattggatgagacttctcttttgggttagatatgatatcgctaaatctttttaaattatgataatattaattgtcaattgtaggtgaaacgtgtagcatagtaagggatagcaatcagaattagtaggaggtttatttgtgtctaagattaaagtaatgactgtttttggcacacgtccagaggcaattaaaatggcaccacttgttttagaattgaagaaacgccataccgagtttgaagcagttacagtcgtgaccgcacaacatcggcaaatgctagatcaagtgcttgagatttttaaaattaaaccggattatgatctagacgttatgaaacaacgacaaacgttgagtgaaattacgagtaatgtcttaatgaatttagaccacgtgattgccactgaaaaacctgatattgtgttagttcatggcgatacaacgaccacttttgcggctagtatcagtgctttttataatcaaacagccatcggacatgttgaagccggtttacggacatgggataaatattcaccattccctgaagaaatgaatcgtcaattaacggatgtattgagtgatatttattttgcaccaactagtcaaagtaaagctaatttattacaagagaatcatccagctaaagcagtctttattacaggaaatacggcgattgatgctttgaaacaaactgttcaaactgaatataatcacgatattctaaaggttgttgatgcagataaacgaatgattctagtaacgatgcatcgtcgcgagaatcagggagaaccaatgaagcgggtctttaaagtgatgcgtcaagtggtcgaaagccatgaagatgttgaaattgtttacccggtccatttaaatccagttgtgcaagaagcggcgcaaagtatcttgggcaatcaccctcggattcatttaattgatcccttagatgttgttgatttccataatttagcagctcgtagctatttcattatgtctgattcaggtggtgttcaagaagaagccccttcactaggcaaaccagtacttgttttgcgcgatacaactgaacgtcctgaaggcgtgacggctggaaccttgaaattagtggggactcaaccagaagcagtccatgacgccatggttgaattattggatgatcaagcagtctatgatgccatggcccaagctaaaaatccatatggtgatggttttgcctctaagcggattttagatgcaattgcgtatcattttggtcaaacaactgagaaaccagaagaattttaaaaataatttaaaaaggtagtattgtaacctagattcctaggtcgcaatactaccttttatttttgagttaatgctcagaaactacccgttcgagtgagaacttcatttttttctttaacgtgctatctcaagcaaaccttgagagagcactcatttttgtaacgtgttccttctcacagtttcctgtgcttagctacgtttcccaaaaaaaggtcataattcgacctttgtttgcaaaactaggctaatgctcagaaactacccgtgagaagtcgcacttcgattataacgtgcttctcaagtagccttttccggttaactacaaaatcagcgttatgattcagagtgcaaatcataacgctgatttttaggttaatcctcaaagtctgaccaacttgagtcagcactcatttctctttaacgtgcttctgagctagcttcttccgtctagctacgattcgcaaatcatgaccaaagctcggtcataattcactaatctaggctatactcagaagctgaacagctcagtcagcactcatttcttcttaacgtgcttctcaagtagccttttccggttaactacaaaatcagcgttatgattcagagtacaaatcataacgctgatttttaggttaatcctcaaagcctgaccaacttaagtcagcactcatttctctttaacgtgcttctgagctagcttcttccgtctagctacgattagtaaactatgaccaaagtccggtcataattcactaatctaggctatactcagaagctgaacagctcagtcagcacttcattttttttctttaacaatgtataccggtctgttctttacttctaggtagattttaccgatgtatttaccgacaatgcctaggcagaggagttgtaggccgccaaccattaacatgactgaaatcaatgatggccagccagtggttggatcgccgaaaattaaggcgcgaatgatgataaaaattaaggctagactcgcaatgataaacgagaagaagccgataaatgaggcgatggccaacggtgtttctgagaaggtaacgatcccgtctaaagaatatttgaatagtccccagaaagaccaactagtggtgccggccacgcgatcttgattctgatattcaagatatttagtgtcgaaaccaacccaactgaaaatacccttagaaaaacggttatattcggacatttcgaggattgcatcaaccatttgacgggtcattaaacggtaatcacgggcgccatcaacgatttcagtttgggaaatccggttgatgattcggtagaattgtttggcaaagaaagagcgaattggtggttcaccaacccgagttgtacgccgggtaccgacacaatcgaaaccgtcttgttcgataccggtaatcatttccggtaatagtgcgggcggatcttgcaagtcgacatccatcacggccacgtaatcaccagtcgcagcttgtaatcctgcgtagagcgctgcttccttaccaaaattacgtgagaaagaaatataatgaacgtgatccacatcagtggtttgcaaagcccgcatttcggcgagtgattgatcacttgagccatcgttaacaaaccaatattcgatttgatgattggtgagtgtcgcggccaccttttcaacggcggcgtaaaaaagtggaattgattcctgttcgttatagcacggtacaatgattgagatggtcttacgcatgttaatcccccgatttttgattaaaaatccatttactaaaaatataattggctaaaataacgacaacttgatcgataattttaacgaccatgttgggacccgctaataatgaaatcccaacaaacataatagcggtatccattaaataggatataccacgaaagaagaagaaaccacccatttcacggataaaagcagtgaagttggtatattttgattggaagacccaagttttattcgtaaagaaagcgaaaagaacggataaaaaccacgcgattgtattgcttagtaaataataccagccagtgtaacggtctaggacgaagaagacgaccatattaaccaaggttgttaagacaccaaaaacgagatacatcagttgttcccgatatttatgaataagggtttgggcagttttaatcatgatttacctcgatttcggattgtgtgataatggcgcagaatacgaccgcgtagggccatttgtttttcggattttttgaatgtatagctggttgtgatgtaattaacgatgccgacaatcaattggtcgatgattttggcggtcatactgtgccaaccgagcattgaaatgccgacaatcatcagaccgttgtctaaaaagaacgagacaccgcggaaaaagaaaaatgaaataatttctttaaatagcgctctaaaattagtgtacttcgattgaaagaccaatgatttattggtaaaaaagccaaataggttggcaattaaccaagccaccgtgttcgcgagtaaatacggccaaatcagcgtgtgccgaaagacccaataagtcgcaatgttaacgacggaagctaaaaaaccaaaaacggtataagttaaaaagtcgcgatacttgaatatcatgcgtttgataaaagccatagtaagctcctcagttagtttaatcatgcaacaaaggtgatgatataaaaaaatacccaggcaaccccaggtatctagtcagtcgtcagtttcaaaaattagagactttgttgcttagcgacgatttcgctaacgaatttttctaggttagcaatgtcgtcagcttcaggtgctaaatcgactttaacgacgtctgcccccttagtagcgccagtttgttcgaagatagctgcaaaatcatcaacgactttacagaattcatcgtagaaggtatcaccagagccacagacaccataaaccttgcccgttaaatcttcttcttttaaatcctcgtagaaatcgacggcttcgtcaggtaagtcgccatcgtccccataggtatagctacaaacaatacagatatctgcatcttcaaaatcagcaggatcagcttgtgagatttcggttgtttcgactgaaacgttcgcattttctaaggcttcttcaacgatttcagcaatttcttcattattaccagtcatacttgcgtagactactttggcagttgccatgattggtcatcctttcatctaaacgattacgattaactcaccgtaaaatgtctgcaatactatccgatattatagcaaattccattctataataaaaggactgagcgattcgatgattgaaaaaagttgctaaaaacaggggattaacaccattttaagggtaagtagcgtataatagttctaaagaacgacttggaggtcataagattgattacattaaaatctgaacgagaaattaaagggatggccgcatcaggtgccgtcattgccggtgtacaacaagggttattcgatattatcaaaccaggtatttcgagctgggtcattgaagaattcgctaatgattacattgaaagccacggcgctcgcgcctctgaaaaaggctttgaaggttacaaatatgcaacctgtgtcagtgttaacgaagaagtagcccatgccacaccccggaagaatctaattttaaaggccggcgatattgtcagtgttgatatgacggttaatttagacggttacgaaagtgacgcttgctggacttatgcggttggcgaagtcaaacccgaattacaaaaattaatggacgacacgcttaaatcactctatttagggattgatcaagctgtcattggtaaccgaattggtgatattggtcatgcaatccaacaatttaccgaagttgaaaataactatggtgatatccgcgaattaattggtcacggtatccaaccaacaatgcacgaacaaccaaacgtcccacattacggtgaagctggtaaagggttacgccttaaagaagggatgacgatcaccatcgaacccatgattagcatggggacttggcatattgcttctagagaagcgaagggtgacgattgggaatactacgtcacagcagacggcacaccatgtgcgcaatatgaacacaccattgccatcacaaaagacggcccaaaaatcttaacggcccacgacaacgaagatccaaaatacttgatagactagatgagtactgactcaagttggtcaggctttgaggattaacctaaaaatcagcgttatgatttgcactctgaatcataacgctgattttgtagttaagcggaaaagattgttcgagaagcacgttataatcgaagtgttcattctcacgggtagtttctgagcattagcctagttttgtgaaaaaggtcgggttatgacctttgtttgcgaaacgtagccaagcacaggaaactgtgagaaggaacacgttatgatcgaagtgctgactcagtcgcttccaataatcacctactatcttgtattttaagataatgggtgatttttttagttaagaataatacgaatcactttaaaaaaaacgaaattataatgtttttacttaattgattattgtataatgacactattaactagaaagtgaggcggattttaatggataatttagaactaacagaggcggtctataaggtaattgttgatggaacgctaaaaggttacctgcagtatttagaagaacgtaaacagaaaaaagcgacgatggcagtcagcggcgcatatgcttggacaaagggaaatcatgttgatgatcaggtcgctaaaatgggacatgatttagattttacgattgaaaaggcgggttatacctgggaatatctacaattctatctagataaagcggatgaaaagtttatgataatcgttaaaaacgccaaacgagtccaacaaagtttaataaaacaacaaaaacaagacaatgaacataactatttgtatgaattagcgggctgtaacgtggggctattgaggcaccgacaagttaattcaactagacagccagaacagattcagttagagttgagtgatccaaatgaggttcaggcaattctaagcgatacaagattagaagctaatcagaagttttcgcgtttttatatcgtgacctatgaaattgatgaacagtccaaaatgatttcgacaattcagctaacaatgttgaatcgagagacaatgacgttagaattaattgaagatttaacgcggtttattcagcagagtgactatcaaccaacagttgaggatgttgcaccaattatggatgaaagtgaaatgaatcgaagtgttttttctggggattcaaatgcgtttggttattcaataccggtagaaaagaaagcgacaaaggaacaataacgtcgtataaggatgtgtatgaaatgttcttcggagagaagttacaaaaagttagggaattaaatggcctctccagaaaagaactcgctgaaacaatcggcattagcgagcaggcaatctggcaatatgaaaatcaatataccgtaccaaaatttgaagttatcaatcagtttaaaaaaatattcaaagtgaaacctcagtttttttttgaagcaccattcgtagaacaaatcagttcaactgatgatattgcctatcgatcggacgatcgcgatgctagaaaaaaagtgaagatggaaacgagctatattgattttgttgattattttattgagcaatttgagacacaattagacgttgaacaaggtgatattgaaagtctaacgaatcaaattgaacaattatactatggtagtgatcaaaaaacaggcgagaccattgcggaaattgctagaattgcacgaacgaatctgaatgttgatcaaaataaagcattattatatcagttagaaattgctggggtgtttgtacttgaaaaaaatatgggaccaaccatcgatgcatacagtacgtggacccagaatcagcgaccattcatcattctaggtagtaagaagaaatctgcggttagaagaaatttcgatttggcgcatgaattaggacacctattgatgcatcgcaaaattgatatggatagtttaacgacttttgaatataaggcgtatgaaaaagaagctaattattttgcgtccgtttttttattaccagagcaggaatttatcaaagattttgaaaaaataaataagaaatctaatccgttttcgtatgttgaattaaaaatgaaatattcagtttcgatcattgctttggaatatcgtgcttatcagcttaatttattgagtttcgaagagaatcgttatttttacgcgtcacttaatcgaaatggttttagaactgaagaaccattagatgcagatatcccaattgtaaaaccaggtaaagttcgagccttaattagttttatttttgaaaataagttattaaagatgaatgactttttagatcaatatcaaattgaagccgaatttttagcaacattattggcaattgaaacaaccttcattgcccaatttgaacaattaaatacgaaggaatactacttctcaaaatgagtgcgacttctcacgggtaatttctgaacatagcctaagaaaaacaattatggttggaccatagttgtttttttgtaaatccatttgtgaaaattatgttaatgaacgatattaggtccttgatataactagtgaagtggttttattttcagaaaactattaagaaccatgattaatcatgtataatgaaccatgatagtcaagtttatgacatttaacgctcttgttgcttatcaaatacgagggtataatgattgagtttgtaaggagtcgtatgaaaactgagaaaaaagaggtaccgatattacgacagactttaccgaaaaggcgaaaaacgatggcgttcattaaactaatgattctccgttcaacagaagctaacatcggtgatagttccaaagtaatcgcttatttcgcgttattatcggtctttccattactaattgtcatcggtaacgcgctgccatatttccatttagatgtgatggcagttgccagttacgttcaaacggctgtgccacccgccatctttaatcgggttatgccaacacttcaatcgttactcaacaaaccgaacagcggtttattatcaatcggggtaatcgggacaatgtgggcggctagtaaaggaatcaatgctttgaaggacagcattaaccgcgcttacggtgtcgaaaaggttcagaattttgttttgaaacgcctaatctcgctggggagtacattagtcctactactattattgattagtctaattctggtatttacgtttgggcaacaagtgctcgaattaattgcgccaatctttaagattccaccgcattatattaatatttttagtagtttaaaatggcccgtaacagcgagcgtcgtttttattattctaatttttatctactttttcattccgaacgttaaaatgcgaatgcggagtgtgattcccggtgcaatactaacgacggtcggttggttagcgttagcgcaaggcttttcattgtatatgcgctactttgggacctcgtggaatagttatgggacaatcggtgttttcatcattttgttactctggcttaattattctgccactgtcctaatggtcggcgcggtcttgaatgtcgtcgttgaagaggctttgcacggacgagtcgataccagtcggggcaaggtgtacgactttatcgaacggcgtaaagaacaacattaaaatagtcgctaatagttgatatttaaattgtgaacaattttataaaagtaattaaccccaaaaaggattttgttttttaccgctagttatcctataatgttgttgaaacagctagattagtatatcatgctctcgaaatgcttgtcaatccttttttaaatattttttgaataaatattcattatcgagattacttatgcatttccatcagtgtttaacgtttgtcttgctgacaacaaataatactataccaacatctaacaacatcgtcaagtaaatattgctaatttttttgattttttttaaatatacatttaatcaattagcgacgtttgtttcaattgacattctggacagatgccatggacttccatccggtgaccagtgacgttaaaacccgttaaatggtgcgcaaccacttcgacatcgtctaatcccggataaaagatatcaacgaccttgccacaacgatcacagattgcatggtaatgtttcgtctgtgcaaaatcaaaatgactagacgcatccccgtaagccatctcttcgattagccctagctcggtgaacaagcgtaaattattgtaaatcgtcgccacactcatattcggaaagcgacccgctaaagcttgatagacatcatcggctgttgggtgtgcgtgagtgccaatcatgaattccaagacggcttgacgttgggatgtaatccggacgttattttcttttaacttgcgtagtgtccgttgcacaatttcttgactcatctaaaacccctccttttaatgataatcattctcatgtgcgtatttatgttgttatcgtacctttttttagccgttctgacaagtaaaaagaacaataaaaaaagaacccacttctcagtgagttctcaatcttatttcaattctggtgcatccgtctgataaaggttcatcgtcgatttgccaccattttgttgaatgacactagtcttgctcttcttattggccgctttcaattgtgctttagcgtccgttaccttataactaatctgcgatttatctggatcttcaaacccaactggcgtgtagaaacgtaataaatcaccggagataaccttatcggataatgagagttcctccgtgacgtgttcactcaacactaagacccgttgtttttgtttcgtggttaatttcgtgagggctttacccgtcttcgtatcatagtaggtactgccgaccttcgtataatccggtgcgacaaagtccccatttcgaaaggcgacggtttgattccgattggccgctaacaaatccgaaccaaactgaatcgtatcgtcgttcttaacccctaagaggtttaataaggttggtaagacgtcaatttcaccaccataagtgtggttgacgccccctttaagccctggcatatgaatcatgaatggcacgcgttggaactgcgcgttatcaaaatcggtaaacttatcctgacccaataacttcgcaacagccttcttatgattccccgagataccgtaatgatcgccataaaggacaaccatactattcttatcaagaccggtcttttccatccaagtcatgaattcacctaaagcttgatccaaatattttgcggtttgaacatagccatcaacggtatcgtcgccggtatccgtcttagcaatcgattgattctgtttatccaataggtatggataatggttggtaacggtaatcaacttcgcatagaacggttgcggtaactgttcgacgtattgcgctgaatcctgcatgaagatcttatccttcaaaccataaccgacgttgtagcctttaccttctttaaagtattgagaactaaagaaataatcatagccccatgacttataagtgttatcccggttccagaaacttggcacatccccatggaatgaggcggttgtatagccttgttgatctagaatcgctggtgcggcttggaacgtgttggtcgtcccttgcgtcaccatggcagccccttcttggagtccaaacaatgagttttcaagcattaattcagcatcggccgttttaccttgccccacttgattaaagaagttatcaaaactcaacgtatccgattcatggtacaacttgttgatattcggcgtgacttcttggccatcccacttataatcaattaaaaattgttggaaactttcaagatgaatcacaaagacgtttttgcctttagcgacaccggtgtattccacgttcggtgacacacggttttcttttaagtatttcaaaacgctactcatgctgctactatccgcattggctttaatcgcgttattcttggtcgttttaaccccatcgtataccgtataggcgttcatccctagatacttaacgatgtagttattatcaaacgtccgcgtcaataatcctgaacgatccgcttcggccattccgaggtttgcgccgaataaaacgacagataaaccggtaattgcaaaagcgttccgtttcatgaaaatactgcggtcaatcttaatcagtttcgtcgctaacaggatgatcagaatcacgacatccgcaaaaactaagaaatctgaatattcaataatcccagcaatactcttacccaggttattggaaactgaactagaacccttcatcaacgtgaaggttaagaaatctgagaattcacgatagtataaaatattggcaaataaccacgccgacgtgatcaaatccacgacgatcaaagtgatatacgatttacggccgttcatgaacaacgcaatcccaaacaataatagtgttgttgggattggattaatcgtcatgagaaaggcttgcataccacctttgacgcctaaattaaacttcgtttgatacgcataaattgttttgagccagaacaatccgaccgcgaagaggaaaaagccccaacgtgtactcagtccagcttgaattttttgactaacttgtttcatcgatacaatagcctccgttaaaggtcgtttaagcttataaaagccgttgacaatctgacagttagtttacacatctcccacttaaaaatcaatgtataaccgtgtttagccagaaatgtttaaccatttttaagaaatacaaccgaccgttattacctttaaatcaaaaaaaaaccaccaagtattggcttactcaatggttaattacttagtctgctaataaatcgtaaagttccattgcaactaaatcaatattgtcgaattgaaatttctgatgtgtgttgctatcttcaaattcaaatgctagcgtttgtggatcatagctaacggtagcctttaaatcgccggccttttcaaaacgtctttcttgaacctcagcgctttgatcttcttgcattgctaccagacgtttgataatcgcaactaactgtgatgattgcatggcgaagcctcctttaataactaacttacagtttatcagaaaacaggctcgtctgcaccgtttatatgcaattattttacagatgtccaccataacttaattaaagcttgcgtgccatcgtcaccgagttgctcttcattgactagccgtgcgtatagtttcttggcttggtgggtcgctggcaaggtcaatcccatcttttcagattccgttaaagcaatctttaaatctttcagaaaatgcttggcaaaaaagccgggtgtgtaatcgttcgctagaatccgcggaccataattcgccaaactccaattttgcgcactgccaccgttgacggtctttaacaccgcttctaaatccaaaccggccgctttagcataaaccaacatttcggtcataccggtcatcgtgcccgcaatcataatttggttggccatcttcgtgtgttgaccgctaccggccgcaccgaaataatgaacgctttgccccatcgcttcaaaaattggcaaaacttggtcataagccgctcgatcgccgccgaccataatcgttaaagtcccttttttcgcgccaatgtcgccaccggaaactggcgcatccagcgtttgaatgcctttttcagctgcgctagccgcaattttctgggcaagcgtcggtgtactggtcgtcatgtcaactaagatttgacccggttggacgacactaaataggccttgttcaccataatagatggcttccacatcctgtggataaccaacaattgataaaatgacgtcgctttgttgggcgactgcagctggactatccgcccatttcgcccccagtgcgaccaacgcatccgttttatgcttcgttcgattgtagaccgtgaccgcataatccgccttcagtaaattcttaaccatactactgcccatcacaccggtaccaataaaaccaattgttggttgcatcttgaaaaacctcctattttttggtggttaacttcggcttcaccgctaacgctaaaatccccatgaacatcccgagatagtaggtgaataatcgccaaagtaacatcgctaacactagtttactggaactgagtgaaaaagtggcaaataaggtcttgaaactgtattccgcaccgcccgaaccacctggaattggaaataacgagacaatcatgacaatcatgatgtgtaaaaccataacttgtaagtaattcacattttgtgcaccgagcgctaacaatacaaaatacggcacactgtaatagaatcccaattgcccgagggttaacaggcaacccttcaataatttaaccggttctcgtttcaaatggagactctcggcgtaaaaagtatcgattttgaccaataacaacgcgtgccaagttgccacccgtttttgcgagacgaaccagccgaccggaattaataataaccgcaccaattgtttcgtgaaccggttgtaatacataatcaacaacaaagcggctaacaccaccacgtggatgattaggccgaaactgattagaatcgacaacgtcccaaaatgtttcgagacttgcgaaaaaccgacaatcatactcaatagaaaattgacgagcaccatgaattggtacacgataaatttcatcaataataccgagctggcttgaccggcttcgaccttcgattgcatcaacgccactaattgtgcgggttgtccaccggttgaaaacggcgtaattgcgttaaataattgttcaatcaacggaatccgtaccgcgttatggacgttaaactgttccgtccgcccctttaagaagacccgcagaacaaccgcttcaaagccccacgaaattaacatgcaggctaacgccaccaataaccaaccccattttaaccggctgacatcccccactagctggttgaaattgagactgcgactttcgtaagcaaagatcccacaaccaattgctaacatcacgacaaacacaattttatttactctactcataaacgacccttttttctgattgttggccagattaactcaataaaaaactgctgattccacaatcaacagtttagccacaaccggctttatttcttagaatctaaatcttctaattccatcaaatcatcctggtccaaatgaaattcatcatacatcacttgggattgcttataaaacgcaatcatctgttgggcaaaataatccgcagaaattgtataaagtttctgctggcgcggtgctggatcatcaaaagccgttggatggttcaaataattaagcacttgatgaatcatttccgtttccgtcgtaaatgtcgtcccaatcgatggatccgttaataaatcaccggcatacggactcgtcatgaccacaatcttacgttgcgccgccatcgcttcgatatacgtaagaccttgtgattcagaatcactcgccgacacaaataaatcagccatgtggtaataattcgtgacgtcatcattatcaaccatcccagtaaaaatcacgtgatcgatcatctgcagtctagcgacttgcgcttctaaatcttcacgcgctggcccttcaccgacaatgaccaacatcaagtttggcttttgcgcgactaatttcggtaaggcatcgattaaaatatcaatccgtttttcgtaagcgacccgactgagtgataataagacgggttgttccggtctaatcccgagcgccgcccgaacatcgacggtcacctgttgttcataacggctaatatcaacacccgtcggaataatccgaatcggcgctttaaccccataacgattcaacgtccccgatacccgttccgaaggcgccacaatcccagacatgtggtatagaaaagctttgctcatctgtttaacgtggtaaggccgtaataatttaccgtttagcacgtaatgcaaataatcttcatacattgtgtggtaagtgtggagacacggaatttttagattcttcgccacgaatttaccaatatagcccatcgaaaattcagtctgcgtgtggacgatatctaaatctaattccttagcaacttggtacgcgtgaaataaaccccgcacggcaattcgccgatcagtaaatgacacaaacggcacactcgcaaagcggaaaatatttggttccaccgcgtctttatcgacgtgtggatcggttgttgtaaatatgtaaactgaatgacccttttcttccagtgccattttcaacgttttaatggaggttgcgacaccgctcacttgtggaaagtaggtgtccgtgaatatcccaatattcaaatgttcctcctccttatctttggacagttgtttatattataataatttaaccggatagatgcaattatcgtcctttattgtagtctattcatactagcataaaaaaccgactttagaccgataaacaccacaaaaatcagaaaaggcgattgcaaatcaccttttctgaccttaaaccacttaatgcaatccgtaatataccaataatcctaatagactccacagtggtaacgccaataataggccgttacggacgcccgtaaaaaatttcatttgctcaccaatttcagtaaattagcttaatcgcttgccatttactgaccttctctactatgatagagacaagtttagtcgatgattgttaagaactgacttgcttttacttaagttttattaaaaggagcttgctaatgcagacctatctgattaaaaaaccacaaaaactagaaattacttacgatgaacaaatattagccctacattacccgagtctttttaagaaaaagcagaatgaagaccgcgaaattccatttagtaaaattaaatcggtccgctttttcgaagcgacctatcgtcacggtcatctacaggtcctctatcaaaaaccgaatcacgccctcgaaaaagtggtgattgattttgacactgacgataatctcgaattacgccggatttatacgattttagccgactaccttgaacgcccagcggaagaagatttgagttacgttaaaaccggtgaactgattatggcctacctcaagatgcgcgatgaagggctaatgaccgaagaagaattcgaagaaaagaagcgacgcattttaaaactagaagattaaaaaagacgagtcagcctaaaaaataaggttgattcgtcttttttgacctatttagcgtttaatgaacccaatggccatcccgattaatagaatcaccaagacggcgaccgtaatccaaacgtacagataatcttgttccttggcgaaggcgtaaattgatacgacgacccgtaacaccggcgttaagattaaacaaaataaccctagcatgatgacggccccggcttttaacgctccgattccttgaaaaatcgcggtaaaggttgttggaaattgatattcaccgtaacccgtcccaccgtggaccatcattaaacccaacccaatgattaagatcgtcgctgaaacaatcacgccaattcgtagaattttaccaatcactaattcaatttctgccatttcggcttttctatccgtcattagatttgcaccccgaatccttttaagaccatttgtaagcccatgtagaagagaattggaataaagatgagtcgaatccacttcggttgtaagtattgcataattcgcgaaccaaccgttgcgccggctaaaatccccaacgcgagcggtgccgcaatattcggtaaaatcgccccactaaagaaataaaccgttgctgaggcggcggccgtaacgcccatcattaaattactcgtggcactcgatggtttgagtggcatcttcataatcgtatccatcgcagtgactttaaacacgccactcccaatgcctaacaaacccgatgcaatgccggcgccaaacatcatcgcaaaaccggcaggaactttttcaacttcgtaatcgacttgtgcttgattggctttatcgtaataagtgccatttaaattcaactttttagcccattgatcggtggtccctttttgactctccgccgctttaccccgtaatttttgaaccatattgtacgttgaaaaaagtaggaaggccccaaataaaataaataagaaaccagtcggcacgaccccggtcaacaaagccccgataatcgccccgaccgtggtcgcaatttcgagaaacatcgcgacccgcaaatttaacatatcgtctttcaaataggcaatcgtggcacccgaactcgtcgcaatcaccgaaatgatactggcgccaatcgcgtatttaatgtctaacccaatcgccaacgttaaaaccggtgtcagaataatcccgccaccaatccctaagatggcccctaaaatcccggcaatcacgcccactgccaataataatataatttgttgcattctatccaaatcccctctagccttgattcaagctcaaatcagtctacaatcaactaatccgtatattggctttattgtagcatgtcagactatcggtcacaaatatgcttttgagtcgcaacaactgagcattaatgataaataaccgataatcttaagtgcaagattatcggttatttatcattaatgctcagttgctaaccgcaactcaacgcacttacttattttttcgtttaaaatgtaacgcccgtttaaccacgtccataaaactcaacgattggacaatgtggtccgctggtacgtgttcacgaaccgcccgtagcacctttttaggttctttagaagcaaaggtaaacgtaccattctgttttgttttaagcgcatagcgcggaatccacttgcctttaaacatgattgaagcaatcacgtaatcgacatctttccacggaatctgaataaacttacgtgcatcccgttcgttgtaaaattcaaagccttggtccccaatcataatttgaccataatcggttaaccccgtaaaggccgtggctttaataacgagttccacttttttattgattgattctaccacttgatcacctctcccatactgtatcagccattattatacgccgaattcgcatttctacctaattaaaaacgacgcagtctcctgcgtcgtcaaagcgaaactcgcttacattaattgtaataaatggaagacaattccgactacgaataagccaagaataataacgattggtgatacctttttcttcaataaccacatacagaataatgttaaagccaaacctgctaaaccaggaattaagctatctaagttatcttgtaaagtcgttactttttcaggtgtcaaagacaaaccttgagcttgttgttgtaaagcagattggatgcctttagcaccaccaggtaatttagcccagtcaatgaaagcacctttgtctaacttaactgatgaaacggttggtgtaaatttaacagatacccaacggttaactaatgaccctaagatgaacatcccaaggattgaagcacccttagtgatatcttgtaagatcccaccagataaatcttcagtaatcttagaaccggctttataaccaagttcttgtgtataccacatgaataacatccgaatgatgttccatgcaaggaagtaaatgattggtccaagaatattaccagtcatggctaatgaagcggccaatgccccgataattggtttaacagtaaaccagaagacgggatcgccgataccagctaaaggtcccatcatcccaactttaaccccttggatggtcacatcatcaacgggtgcgccattagcacgttcttcttcaagtgctaaagtaaccccgatgattggtgaagccacgtaaggatgagtattaaagaattccatgtgacgaacaagtgctgccgaacggtcttctttagttttgtataatttcttaattgctggaatcattgaataagcccagccaccattttgcatacgttcataattccaagaaccttgaaggaaagttgaacgccaccaaacagaaatacgatcttttttagttaatttaatttgttctgccatttttgtgaacctccttcttagtagttgtctatgatgtcgccaactggatcgccagtgttaccaccgccgccgccattgccgttacctgaattgccttgttttgataaagcaagatagataagcgcaagcgctaaaccaattgcaccaagtccgattaatgtgatttgagaaatagttgctaaaacaaaaccaatcgcgaagaaaggccatacttctttagtcgccatcatgttgataaccattgcataaccaacggcaacaaccatgccaccaccgattgctaagccgtctgttaaccatgctggcattgctgtcaacatatctttaacggggccagcaccgattgctaggattaaacctgcaggaatagcaattcgtaaaccttgcattgcaatggcaatccattgccacatttcgatttttctgaagttaccttctttagcagcggcatccataatatgaacaatccctgttgctaaagtccgaacgatgattgttagtaataaaccagcgactgccaaaggtacggcaatggcgattgctgaagaaataccagccttaccttgatcacctaatactaaaataattgcagatgcgattgatgctaaagcggcatcgggcgcaacagctgcaccgatgtttgcccaacctaaagcaatcatttgaagtgtcccacctaaaattaggcatgggattaggttacctgttacaaggccgattaatgtacatgcaataacgggttgatggaaatggaattgatctaaaataccttccataccagctagaaatgcaattaacatgaccaatatcacttgaataaaattcaattccatgatgattaatcctccattttcttctgataatgacgtttagtaaacgtcttatttactgtttaattcgttttgtgcttttttaagaatatctgccatgttgccttttgaatccgttggtactttacgaacgtcaaattcaacgccagcttctttcaaagcttcgaacgtatcaatatcatcttgatcaaaagcaagcactttattcggttgaaccttaccagttgaatgagccattgaaccaacgttcaagctcttcaatggcacgccacccttgattgcgcgtaacgcatcttgtggtgattcaaacaataacaatgctttttgaccaccaaaatgttgatcgtctttagccaatttaatcatttgatcgattggcacaacgtgagctttaatcccaacgggtgccgcttgttcgattaattttttccgtaaatcatctttagcaacggcgtcagaaacaacgatgatccgactaggattaactgatttagaccaagcggttgccacttgaccatgtaataaacgtgaatcaatccgtgctaaagcgtattccattttaccaggtgtcccagcatttgaaacggctggtttagccgctgcttttggtgcttcttctggttccaatgcttcaggtctaacccgaacgcctgcttttgcttccccaagaatatgagcagcaatttcatgagcagaagtcattgataaacgtgacgcataagcttcgattaacattggtaaattcaaaccagtgacaattgcccacttatcttgatgagcttcaaacaaaccattggcttgattgaatggtgacccaccccataaatcaactaagaacaagacttcatcatcttcaccaaaactggcaacagctgcttctaaatgcgctttcagatcatcgggaccttcgctcggcataaaagtaactgcttggaccttttcttgttcgccaaaaatcattgaaccagattgcatgatgcccttggcaaattcaccatggctcgcaataacgattccaaccattaacaaaacctccttataagatatagttgcgttgagctaataataaaacgctatcaacttaaaataaaaatataatggcattagccgttttaatcatcaacttgacgctaaaagcgtttcacttaaaacgctttactgaatatattttaccacaaatttctaatctgtctaatcatttttacattattgttaaaattggtctagattgccttgatagcagcggtcatcgcattttgttgtttatttcacataaaatacggtctaaaagtaactgaacaattaaactgaattagtctaaatatacccgttgctaacgcttaatggtatacactatcaccccccgttttaaaccaatcaaaaaagctaggttaggctccaaataattggctaacctagcttttatttaatcgtcgtcacgcttatgatttcatttgggctaaatattgatcacgtttagcttcatcaaattctttttctgatttggcaataatcactgccgccaatgaattgcccataacgttaacagcggtccgccccatatcgactaaccggtcaattccggcaatgaatgcgacccctgatgcgggcaccccaatcgtcgtaatcgttgcgagtaacacaatgaatgatgcgccgggaacgcctgccatccctttagaagtaatcatcaagaccaccaataaggttaactgttgcgccaagcttaaatgaatgtggtaagcctgcgccagaaatagtgcagctagtgattggtaaatcgccgaaccatctaggttaaacgaataaccggttggaatcacaaacgaggcaatcccttggctaacaccgtaatcttgaattttttccattacttttggtaacgcggcttcagaactagccgttgaaaaggccaaaactaattcttccttaaagaccttcaatagttcgagaatattaacgtgccagatccgggcaactagccccgcgaccactacgacgaagaaaatcatcgttgcataacagaccaccaagaagaaaacgagtggctttaatgcgctgaagccaaattgcgcaatcgtgaccccaattaaagcgaaaaccccaatcggtgccagttgcatgatccagttggtcagtttaaacatgacttgtgaaatcatttcgaacgcattaattagcggttccgcgcgtttaccaaaggttgctaaacccagaccgaacaaaacaacgaaaaagataatcggaatcatttcgccatccgtcaacgctttgaagatgttggtgggcacaattcccatcacaacgtccccgaggccgtgattaccaacactcttagcggcctctgtatattgaccgattgaacctttactcaaactatggatatcaatcaaccgacccggtttggtcaaattaccgactaataggcctagggcaatcgcgatggtcgtcatcatttcaaaatacaataacgttttgccaccgattcggcctaacttcttaatatcccccatcttcgcaataccgacaaccaaacacgaaacaacaatcggtaagacaatcatcttgattaagttaataaaaatcgtgccaattgattgtagcgttgcaatggcgaccttattctgatagaaaatgccacctaccactaaccccaagacaatcccaaataaaatccgccaacctaaactaattctaaaataccgataatgttgcacagtctatcactccaatttttaagcttacattgccaatagtgcgagtagttccttaatttcatgcgtgggtttaatcgtcgagctcgtgttaacggcaccgttcggattgtaccaagctgtgtccacgcccacgttttggcccccttgaacatcggaagtcaacgaatctccgacaattaacgcttgggttaaatcaatgtcctcaatttgttggaagaccttctcaaaataggcgggatcgggtttctgataacctaactcctctgagataaaaatacctttaaaataagatttgaattgcgaatcaattaaccgttgatattgcgtatgcgccacaccattggtcgtcacgtacaattcagcatccgtttgcgccaaggccgtcatcaactgttgcgattgcggcattaaatcgtgaccgagtgccaaactcgctaaatactggtgcgataaagtaggcccatccacggttaaattcaaagcttgtttaaaaaaagtcgcaaaacgggtattcaataatgcttcccgtttaagcgtgccttgttcgtattgcacccacaacgtctggttaaacgcttggtaatcagctttgagcgtgggtgtcaaaaccacctgttgcttttcaaataattgcgttaatgcctgatcttcatcggcatcaaaatcaaataatgtattgtccatgtcaaaaaataaataccggtatttcatgttaaaacgtcatcctaatctaaatgttttaattgtccttggaaatcggctatttgtgtataacctttttgctgcataattgtttttaattctgccgttaaccggtcgaaaatcagtgggccttctttttgaagcgcggttccgacttggaccatgctggccccgcataataggtgttcaaagacgtcttggccggatttaaccccgccggtaccgataatttgaatttcaggtttcaagcgttggtaaaaagcgtgcacgttggctaatgccgttggtttcagataatcgccaccaattccgccaaaaccatttttaggtttaatcgtaaccgtctcagttgccgcatcaatgaataacccgttgccaatactgttgacacaattgacaaacgccaatgggaattggtttaaaatagcggccatttgatcgaaatgcacaatgtcaaaataaggtggcaatttaatgcctaacgggccttgatagacttcaaatacgcgcgttaaaatccgttcaactgtttcaaaatcataaccggtttgcggtttacccggtacgttgggacacgataaatttaattcaacgatacctttaaaatcggaagcggtaatctgcgctaatagctgttcatcttcatcaatattaaaaccagtaatcgattgaaaatagattttgttcggaactgcaatttgttgctgactgacataatctaaataataaggtaaaccgtgattaggtagccccatcgaattgatgctgcccaatggtgttgccaaatagcgcggttccggattccccgttcgtgcttgtaatgtcgcacttttagtgacaaacgtgcccgctttcgatgcttgcatttgatctaattcagctgcgtcataacaataaacaccggctgcattcatcaaacagttatcaaattcaaaacctgctaacgttgttttagttgaaatcaatttattcgccccttttctcacttatttcaaataattatacgtgatttgctttgtaatttccagttaattattaattaaaagcaaaaaacacgaactttaattgtttaaaagcacaaaaaaagcttggtcgcccaagctttttcattttcagaaaaccaatcggttaatgtctcgtctatcgagtcatcctaacccaatcaactcattaaattttaatctgttctaaagccaatccaaggccacttgccacccgttgcccatattctggatctgcttgatagaactgacgaacttctcggatttgaatggccggtttagtcacttggcctaaattcatgacaatattgtcaatcaaccgcgtttgttccgccgccgacaacaaccgataaagacgtcccgctgccgcgtagtaatcatcattaaccgcataatgacccgttttacccgttaattgatcgccatggacttgagcggtcggtacttcagttgggccgtcactactattgggttcataattgaccccacttgcttgattttgcgccatcgcgccgtcgcgtgcgtagttgtgcaccgccacctgcggccgattaacgggtagttgttcatagttggcacctaaccgataacgttctgcatctttataaccgaataaccggccttgcaacaatttatcgggtgaggcttcaatcccgggcactagattagcgggtgaaaacgccaattcttcaatgtcttcaaaattattcgttggattttcatcgagaaccatctgaccaatctcaatcaacggataatctttttgtgagatgaccttcgtcacgtcaaaaatatcgtacttataattaaggccttcttcgtatggcacgatttgaacggccaccgtccaactaggattatccttttgctcgatggcgttaagcaaatcattttgtaaataatcggtgtcttgaccggccagtttagcggccaattcattacttaaattatgcacaccctgattcgtcttaaaatgatacttgacccaaaattgttcgccggcggcattgacccatttaaaggtgtgactcccatagccgtgcatcatccgataactggctgggattccccggtcgctcatcaaaatcgtcacttgatggactgattctggtgataatgaccagaaatcccattgcatatcctgactgcgagcgtgggtccgtggatctcttttttgggaatgaatgaaatcgggaaacttcaacggatcattcacaaaaaagacgggcgtattattcccaacaatatcgtagttacctgcttcagtataaaacttaaccgcaaaaccacgcacatcccgataagtatccggataaccagcttcacccgctacttgtgaaaaccgggtgattagcggcgtttgtttaccaacaccactaaagaccgcggctttagtataagcactcatatcgcgcgtcactttaaaataacccttggcgccagcgcctttagcgtgcaccacccgttcaggaattcgttcccggttaaaatgcgctaatttttccaataattgatagtcctgaattaaaaccggaccgcgttggccggctgtttgtgaatgttggttgtccgaccaaggttggccttcattcgttgttaagtgttccgtcatcgtcgccacttcccaaaaaaaagattttgtacaacctaattctactgcgcttaccgaaaattacaatgattctgctcattcaaactgattaaacgttaaagtaacccgggaaatattcatccgcaaaatttctgtatccactattcttttatagcacaaaaaagacgttgccccttggacagcgcctttttatgacaacccaactactaattagatgtgttgaataatttgcatcaagattggcacgacgactacgaatagaactgtactggtcgtcaccacattagtcgcgtattcaacatcgccatgcgcttgaccgacaagaattggtaagacggctaatcctggtgttgcggcttgaatgattaatgtactttgttcaaccgtcgggattgtcgccgtattcttgaaaaagagcatgatggccatcataatggctggcgccacgacaaagcgtcccaataaagcgagcactgtatcgcggtcgaagtgaatcgacttcaatccagcgtcagccaagataatcccaatatagattaatgacatgggtgtcactatgccacccaccattgagaatgttttatcaaccaagtttggtaatggcagaccggttaatagatagattaaggctgctaggaagccaatgaggggtgcgggtaataatttacgccaattaaacttgcctttagcagcgcccttttctttagtaggatcatcgtttgaaatgaagaagaccccaatcgcccaagttgaaaccgtattggccacgtaataaatcaagaagtaaggcaaactcttatcgccaaacaaagcgaggttcaatggtaatccaataaagattgtattggcattaacaaacatattaatgaacgttccccggcgacccggacgaatccggaagattttggttaaaagccaagcgactaaataacctaaagcaaaactgattaagacatagattaaaccgccggataaaccgactaacttttcacgggttaaattatccaaaactgaaacgaaaatcgataacggtaacgcgacgttcataattaaaaatgaaatgctgcccttaaaattgtcatcaaatttcttcgaactccgtaaccagaaccccaatgcaatcacgaccacaatttcgatcacgcttgataaagatgttaaaaatgcgtccaactctttcacactcctattgattgtttatgccaaaatttactgaaccgttttgtattctggtacccattttaaatgagcaacggcctgtttaatatccgtaattggttctttgttaataccttgtttgacggcactttcagcaacagcattcgcaaccgtttgtgagaagacctctaattgtgtgaccggtggtaacaccgccgcacccacttcagttggatctacaattccacccaatgaatgagcagctgcactaatcatttcatcatttaaaactttcgcggttgatgcaatcgtgcccaagcctaaaccagggtaaactaacgcattgtttgcttgaccaatttcataagtgacaccgtgataatcaactggtgcagccggaatccctgttgccactagcgcttgaccgtcagtccatttaatcaaatcttcagcagtcgcttcagctaacttagtgggattagacaatgggaagataatgggccgttcagtatgggccgccatttctttgacaatgctttcggtgaaagtccctggttgcgttgaagtccccactaaaatagttgggtggattgctttaacagccgcttctaatgtcgttaattcagcagcattcgcgaattcactgcgtttacgggcaaatggtttttgttcaggtgttaattctggatcgtcatcaaacaataacccttgtttatcaaccatgtaaaaacggctacgtgcttcttgttctgacaaaccagcttgttgcatttcttcaaaaatccggtgggtaattccggccccagcggtcccagcaccaaaactcatataaacttgatccgtcatcttagcccctgaaatatttagcgcgcccataatcccggctaatgtgataatcccagtcccttgaatgtcatcgttgaaagtcacgatttgatccttatatttgtttaagagattagccgcattactccgaccaaaatcttcgaaatgtaaatatagattagggaacaatgcttcagtagtttggacgaattgatctacgaaatcatagtaacgatcgccgcgaacccgttcatgacgattacctaagtaaaggtcatcattcagtaaactgtcacggttggtcccagcatctaaaacaacgggtaaaacttggctaggatcaatccctgcagcggccgtataaaccatcaatttaccaactgagatatccacaccttgtgtcccccagtcgccaatgcccaagattccttcaccatccgtgacaacgattaatttaatttcacgcccatcagcagcgttcgttaaagtcgtcttcattgaatctggatcgtcaatagataagaaagccgcattttgtgggtttacgtataacgcactgtagttttcaattgtatcggcaatcgttggatcataaacgactggcatgaattcagcaacgtgttgactgaatagtttgtagaataaaatccgattttcgttgaataaagtcatcaaaaaaatgcgttgttctaacatagtcgctttggtttgatattgagcgtatgcctgtttaacctgatcagccaatgtttgaacgtggggtggtaacatccccgttaaaccaaattgggcgcgttccgccttagtaaaagccgtgcctttgtttaaaaatgggtcatttaaaatttgttgtgcggtttccttcatatcaaaaatcccctttgtcttcgttaatattgcttagtatagagcagcccatatttgatagtcaaaacctcgatctatgataaaatagatttatatgaccggttaaaagtcaatgatactaggagcttttcatgaaaattaaagatttagactattttacgcaattaattaatttaaaaaattttacagcggtcgccaatcatttttcggtgagtcaaccaacgattacttatgccgttaaacgacttgaagaagaatttgagactgagctgattgtccgcgatcaatcacaccaagggattatcatcacccctagtggtgaacagctctatcgacacgcccaaacgatcctcaaggaaatcgccttaactgataaagatatggctcgaattgcggcgactaaacttaaattcggcttacccccgattattggcacctactatttctcaaaattggcccccaaacttattcaaacgggggtcatcaatcaattcgaaacgattgaagccggttcttcagaattattggcagatttggaagccggtcggattgatgcggctttgcttggatcggcgagcccactcagtaccgagaccattcaagcggacgtcattgaacaacaccgctttaagatcatcgtcagcccagattcaccgttggctgaccgccgacaaatcggatttgccgaactcaaggatcaacaattcatcatgctcgctgaaggttttgtccatccacacgtcttcaaagccctttccaaagtcaatcggattcaccccaaggtcgtttatcgaacgtctgatgccagtattcttaaaagtatggtccatgccggtgctgggattggctttctaacggaaaccggggtcaccaccgctgatgacctcgttagcctcgatttaactgacgaaccacagccaaccttctacatctcattggcctaccggaaaagccagcgtttctctgaaacccagcaagctttattagacagtttcattcaaatcgcgcgggactaccgcctcgattcaacccactaaaaaaactagcctaagggcagacaattgtccgccttaggctagtttttattttgaagtcgttcgtttgaatcttaataacggggttgcgatggcgggcactagaatcgccgcagcgataatttccaacgtcgcgttgaccgtaaaggctgataacatcacccagattaactgattggccgatgtgtggtacaatccggctgcttggtgttgatagaataaccacgtcaaaccaatcactaagccggtattgaccatcgtactgatgatggcgatcagacccatcatcaacgtctttttagtcggcgccctaggtaatttgaccgctaaactccccgcaatcagtccgaccaataaccgcggcagaatcgcaatgattggattgcgaaaaatcagaattgctaacggatcagtcggcatcacataggcccgaattaacgaggtaattccccaaatcgcgcctaaaatcgccccatctcgtggccccagaataattgcaccaatgatcactgttaaatggatcgtcgtaatagctggcagtcccggaatcaacgtcaaattcccgaccatcgggacaaaaccttgaattaataataacgctgttaataccgctagtatactcatgcgataggtgtttaaaaaacgtggtttcatatgagtctccagtatttaacgccccaaagccaccatctctcctaataattgattggtcaacttaaaagctaattgtgctactgtttcattataaagggctaagtcggcggaagcaagaacctgcttttgttcaaaattaatttgctgttgtcgacattgtgccaataaattagcttcaaaattagtcgttaattcagaataatgattgtagttagtatccgccaacacggcgactagccggcttagccaataaatattattcggattaaaatcgactgtcgtttgtcgataaacggccggtgtctgatcaaccgccgcataaaatggtactaagccattaaacggattcggtccgtacgctaaccaatgaatacccgctaattcggctggcacatcgtttcgaatctgtagaatgtgaacttcttcattccgattcaacccaattggtcgataacgttgctgctcctctgccgtcccctgaccgtacggatcaaacggcgtattttgataatgggcactcaacatccatttaacgtcggcaatcgttaattgcttattcggccgacagataaacggcaaatcatgatccgtcggttgcccactaggctttagactgaagcgttgttgaatgtaccatgctcgcggattgttataagaacgatccttttcagttgcactcccaaaaatatgccgtaaattaacttgatcggtatcgggatttaaatggaactgttcaatcatcgcgggtaaatcagcggcaaataacgtatccactgattcaaaatcaaactgatcaatgttaaaccggtttggtgcaatcacatacgcgtcatcaggaatccgaatggcggcccaatgatggcccccaatcgtttcgagataccacacttcgtcgtgatcggcaaaggcaatgccatttggttcataagtgccataagtttctagtaactgtcctaaccgactaaccccttcacgcgcagtctgacaatagggtaatgtaatactcaaaaagtcagcctcgccaatcccctcgtccacaaacggatcgattgctaggatttccggattagtcgtaatcgtctcacaagccgtcatggcgacattctgactgttaatcccagaaccaccccaaacaccataggcgggatccacatccggtgttaaagtacatcttaacggcgcagttggcaacggtacttcaacgccattggcttctgacttaaagattgtcggttgctctgccggttggaccaccacaaacttctgtggattaggtcggccgtaaccatcctcattacgcgcaatcatcgtcgaaccatcgtatgacgctgctttcccgaccaataccgtcgtgcaagaactcatttttttcttcattatgccactccttacctctaaaaagttatcgattatcttaaaaccattctaacacgttatctcatatttgttatgctaaattttgaatatttttgcaataaatagtcgatatatccgttaaatctccaataattcgcattaatattcaatttcatccatattttaactgaacaaaaaaactcagcaatcacaaggattactgagttcccgttatcataattaataccggtgatcggggtcgaaccgatacttccgtgaggaaacgggattttgaatcccgcgcgtctgccaattccgccacaccggcatgattgaacttaagttagcgcctaaacgcaaaggcggtaaccggatttgaaccggtgatgaaggttttgcagacctctgccttaccacttggctataccgccatacaagaacaaatcctgttctaaattaaaaaattgggctagctggattcgaaccagcgcatgacaggatcaaaacctgttgccttaccgcttggccatagcccaatgaaagggcggtatatgggaatcgaacccatgtgtgtcggatccacaaaccgatgtgttaaccacttcaccaataccgccataacatgtaatattataccatatcttgcatgaatatgcaagatacaacataaacagggatagtaggaattgaacccacactgacggttttggagaccgtagttctacctttaaactatatccctataaaaaaatggaggagagtggattcgaaccaccgaacccgaaggagcggatttacagtccgccgcgtttagccacttcgctactcctccataagaaaaaagaaattataaatttttttaatttatgtaaatgctttttagggcaataaaatagcgctctatttaggcaatatgctacgcttaacttaaatcaattaggaggcgattaagatggcagataattatcaacgaatattggtcggattggatggttcaacgattgcccaacaagtgtttgaggaagccgtggccgtggctaaacggaaccgggcagcgctgtttattgcgagcatcgtgccggataatgaatacgcttcggtggctgtcggggcatcgatgcaaatgattgatgcagaaactgcggaagctgaaaaacgggtgcacgaagcgacccgttatgcggaagaacacggtgtgactaaagtggtgccgattgtccgagtggctgatccccgtcgagcgttggccgaaacactaccagtcgattaccatattgatctgattatgctggggattacgggcaagggtgttatccaacgactattagtgggttcggttgctcagtatgtgagtcgtcacgcaacgaccaatgtgatgttggttaaacaacggacgcttcaagaaccagtcgcgactgaagaaaagtaagaattaatgaaataattcacaaaaatgtaagcgcttatgctatgattaagtaaatcaattagcaaagtgaggttaaccccatgaagacgccacggttaaatttaccagaagcggttgcacgcagaattccaatttattatcggtactttaaattactggatacggatgggattgaacggattaaatctgaacaactagccaaactggtttcgattccgtcggccacgattcggcgggacttttcctatttgggggatctcggtcgcagtggctacggttatgaggtgagttatctcatcaagattttctcagaagtcttaaagacggatatcacgactaaaatcgcggtcgtcggggtcggtaatttagggcgggccttaatcgaacataattttaaacgtaatcccaatttagtgattagttgtgcgtttgatcaacaaccggccttaatcgggcaaacgttgaacacggtccccgtttatgcgagtcaagagttagcaatgcaagttcaaacccgccaaatcacgacggcgattttgacggtgccgagtgaggtcgcccagcaagtcgcggagacattggtggcagctggtgtgacgtccattctgaattttgccccagcacgcttgcaattgccacaccacatcaatgtccgttatttagatttaacggctgaattacaaacgttgttattatttgaagaatgagagttgacctttcatggattctcagctaaactattaacaacgcgttgaacaagagcgattagtaggaactcgtccagagagaagaaggtttgctgcaacttcttccgaggcactactaagcggtagcttgtgagctgtcatcttgaatcttagtagggatgaccggacaaaccgtccgttaacaagtcatgagttggaggccttagtgtctcaatttaggtggtaccgcgaaaagcattcgtcctattgtgatgaatgcttttttgttgtcataaaacgcaattatatcaaaggagttcaagctgatgacaaatcaaaaagagatgtcgactaaatacgatcctaatcaggtcgaagccggccgttaccaagaatggctaaaggcagatgcctttaaacccaatgctaatccggatgccaaaccctattcaatcgttattcccccacccaatgtgacggggaaactacatttaggccacgcctgggataccactttacaggatatgttaatccgtcaaaaacggatgcaaggctacgatgttttatggttaccagggatggatcatgcggggatcgccactcaagcgaaagtcgaagcgaaattagctgaagaaggcatttcacgttatgatttaggtcgtgaaaaatttatcgaccaagtttgggaatggaaagatgaatatgccgcaacgattcatgatcaatgggctaagttaggcttatcattagactattcacgggaacgttttacgttagatgacggtttatcagatgccgttcagaaggtttttgtgaagctctacaataaagggctcatttaccgtggcgaatacatcatcaactgggatccgaaagcgcggacggccttgtcagatatcgaagtcttgcatcaagatgacgaaggggcgttctatcacgttcgttacccactatctgatggttctggcgatatcgaaattgccaccactcgtccggaaacgttaccaggtgatacagcgattgccgttcatcccgatgatccgcgttacaaggatttaatcggtaaaacagcgattttacctttgatggatcgagaaattccaattattgcggaccactatgtcacgcaagatttcggaacgggtgcggttaaaatcacaccggctcacgaccctaacgattttgaagttggtaatcgtcatgatttaccacggattaacatcatgaacgaagacgctagtatgaatgaaaatgctggtaaatataacgggatggaccgtttcgaagcccgtaaagcaattgttgctgatttagacgcggccggctatttattgaaggttgatccaatgacccatagtgtcggtcattctgaaagaacgggtgtccaagtcgaagcccgcttatcaacgcaatggtttgttaagatgcaaccgttagctgaaatggcgttgaagaaccaagcaaccgatcaaaaggttaactttgtccctgaacgttttgaaggcacctttacccaatggatggagaacgtgcatgactgggtcatttcacggcaactatggtggggccatcaaattccggcttggtatcacaaacaaacgggtgaaatgtacgttggtgaagaagcacccaaggatattgaaaactggacccaagattctgatgtgttagatacttggtttagtagtgccctgtggccattttcaacgatgggctggcccgatacagaagcgcctgatttcaagcgttacttcccaaccaacacgttggttacgggttacgatatcattttcttctgggtctcacggatgattttccaaagtctggaatttacggaacaacgcccatttgaacacgtcctaattcacggtttaattcgggatgaacaaggtcgtaagatgagtaaatcattgggcaacgggattgatcctatggaagtcatcgaaaaatacggtgcggatgcgcttcgttggttcttgacgagtggttcaacacctgggcaagatacgcgtttcagttatacgaagatggacgcggcctggaactttatcaataagatttggaacgcgagtcggtttgtcatcatgaatctagaagacacaccggcaccaacgcacattccagaagccgctaatttagatttaacggacaagtggatcttaaaccaattgaaccaaacggttgctgaagtcactcgtttatacgacaacttcgaatttggtgaagctgatcggaccttgtacaactttatctggaacgatttctgtgactggtatatcgaaatggccaaagaagtgctctatggtgaagaccaaacagcgattgccaacaaacgttataatttggcctacgtcttagaccaaacgttacgtttattgcaccccgtcatgccatttgtgacggaagaaatttggcaaagtatgccgcatgatggtgattcaatcatgaccgcgacttacccagaagtgcatgccgaattagttgacgttgaagccacggaacaaatgaatgcgattattgatttaattcgcagtgttcgtaatattcgttcagaagctaacgcgccattatcaaaaccaattgacgtcttaatcaacattcaagatgcaaaattgacggcgattttcaaaacgaatcaagatttcatcgaacgttttattcatccgaagtcattagaaattgcggctggtttaacagcgcccgctttggctaagacagcgattatcagtggggcggaagtttatgtcccattggctgaattaatcgacttagacgaagaaataacgcgcctgagcggtgaattgaaacgactacaaggtgaaattaaacgtgcgcaaggtaaattgtcgaataaaggctttactgatcgggcccctgaaaaagtggtccaagaagaacgtgacaaacaagctgattatgaacaacaatatcaatcaactgaaaaacgtttagctgaattaaaagcagcgcgctaagcacaatcgaagaagtcccaaaccttaatcgtggtttgggacttctttgtgttattctaactttttaatgggggtcaatcgtgttctatgctaaaatgaaagcagtgcaataaaggagaaacaagtcatgacagttacggattaccagtcggcattggcgtatatccattcccgaccacgattacataaagaagctaatttaaaccgaattggggccttattagacgcattggggcgcccgcaagaaggccaacagttcattcacgtaaccgggactaacggcaaagggtcggtcgttaagatggtcacttgtttgctagaagcgacggggttaaatgtcggccggtttacatcgccgttcattacccgatttaacgaacgaattgccatcaatcaaaccccgattcccgatgcgcaattagtcgctgaagtccaaaaaattgaacaacaagtctcacggttacaagcggctgatccggaatttgcggtgacggaatttgaaacgattacggccgtcatgtttgactatttcaaacaacaagccgttgatatcgcggtgattgaagttgggattggtggcttatacgattcaacgaacgtcctaacgccgcagattgccgtgattacctcagttggcttagatcatcaaaacttattgggaccaaccttaggcgcgattgccacccataaagcggggattattaaaggccaccaccccgttgtcattggccgtttaccaagtgaagcgcaagctgtgattacggaaaccgccaaacgtttagcgagtccactagccatcaatggggtcgatttcgaagcccgcttgacgaagaccctgccaacttggggtcaacaattaatctttagtaatcaagctaatcgactacaacaattacaaatccccttaatgggtgattatcagattcaaaacgcggcggttgcgttacaaacctatttgacttatttagcacaacagcacctgcctgtcgacattttgacgattaaacgggggttgaagcaagcgacatggcccggtcgctttgaaaaaatcaatgatgaaccgctcattattctggacggggcgcataatccggaaggaattgcggaactggttaagacgattcgccaccaatttaaaggccgtgatattcggttgttatttggcgcattaggcgataagaacttggcacagatgttaccaccgcttaaaaaagtggccagcaccttgttattgacgacggtgccggacaatccacgcgccgcaacgccagaacagtatgcgcaggtcgattcagaaattgcgattgaaccagattggccggtcgccctaacccgtatattggccgatatttcaaccgatgacgtgttggtgattaccggttcactgtatttaatcagcgccattcggagctattttaaaggagagataattgatgactaacgggattatttttgatatggacggcttattggtcgattctgaaaaagtgtactaccaagcaaatcgaatggccgcccacacgatgggttttgaattaacggccgatgatcaacacgcgattttggggacaaccgatcagtacatgcgtcaatattttgaaacgaaactcggttcaactgataagatgacccagtttattgcgttatcttacgctaaggtcgaagaagtcgtccaaaatgacggtgttgcgattaaacctgggttggttgaattattggactactgtgatgatcaagggattgatcgggttattgcgtccagtaatttcagaaacatggtcgaagattttatgcaaagcaccggcctaagaacccggtttgaccggattgtgaccggggatgaagtgacccacagtaaacccaacccggaaatctttttgaaggcgctagatcaattggccttgccagccgctagagcgttggttttagaagattcacccaatggtgtgttagcggctagccgcgcgaatattccggtgatcatgattccggatatggtggcgccaactgcaatcatgaaccaacaaacgctcgcaacggtggctaacttagcagaagtgattccgttcctcaaaaaataatcaacttctcacgtatgattgagagaaggactaaaagcagttcagctgaactgctttttttgatggggaggtaacgatgtttaaaccacgggaacaactcatgcaacacggcgctgctagtctaacggatgaacaattggccgctgtgatattacgcgttggcaatcaacaagcaacggtccaagaagtggcgcaatcgctgttaaaacaatatcctgattttcgcgatttagaacaagccagtttaacagaattagtgcgtttgaccgggattggtccggttaaggcgatggaacttcaagcaatctgtgaactgagtcatcgattgcaaatgcaacgaacgattcgctttggcgtgattgcttcgagtcagatggtcggtcagcgaatgattgatttattggcgggcgaaacgcaagaacagctattagtggtgttattggatgttaaaaaccaggtgattcaaattaaacaaatttatatcgggaccttaaatagttcggtggcccatccgcgtgaaatttttaaattagcggtgcagtattcggccgccaaatttattttggtgcacaatcatccgagtggccaattaacgccttcaactcaggatatcgcctttacgaaacgggtgacaggttgcggtgagttaatggggattacttgtttggaccatctgattatcggtagccagcactatttaagtttgcgtgaagagggctatttaaccgattaaggcgtttaaattttggttaagaatcttttaattttggtatagagatgaaaataatcatgaaaatccgttaacatgtagttacattgcgttttttattatgaaaaattatgatataatgccaatgactataaaaacgtttggttatcgaaggagagaaaaatagtgttcggattagggactaaaaacatcggtattgacttaggtaccgcaaatacgctcgtatacatggacggtaaagatatcgtcttaagagaaccctctgttgtcgctaaaaatacacagaccggtgacgtcattgccgttggttctgaagcacgtgacatgattggccggacacctggcaatattgttgcgattcgccccatgaaagatggcgtgattgctgattatgatacaactgcagcgatgcttaaatatttcatcgaaaaatcattaggtcgttcatctggcaaaccatttgtagtggtctgcgtccctagtggtgtcacagaagtagaaaaacgggccgttatcgacgcaactaaagtcgctggcgctcgcgatgcttatgtgattgaagaaccatttgccgcagcaattggtgccggtcttccagtgatggatccaacgggtagcatggttgttgatatcggtggtgggacaactgacgttgcgacgatttcattaggtgggattgtttcaagtcgttcaatccggatggccggtgataaattagatgatgcgattatttcatatattcgtcaaaacagtaatttattaattggtgaacggactgctgaacaaatcaaattccaaattgcttcagcatcacctgaacgcgctaaagaaatcgaaccaatgagtattcgcggtcgcgatttagtgactggtttacctaagacggttgatattcaagccgttgatattgctgaagcgattaaagaagtcgtgactgcgattatcgaagccatcaaagaaacccttgaagaaacatcacctgaaattgccgctgacgtcattgatcacgggattgttttaacgggtggtggtgctttattgaaacatttaccagaagttatttcggatgccactaaggttccagtattcatcgcacaagatccattggattgtgttgcggtcggtactggtgaatcacttaagaacatcgatgttatgaaaaaaaattaaacaatcttaaaagtgggacaagaagtggttagtttgtggaacacctaaattagagactgattcgggttgtgaatcaagagactagtttagaaaccgcctaatcgttttttgtcccacatttaggctattaaagatggatggtggcgaagaaaccatgcaaaagtttttctcgaataaaaaattaattgttttattagttacgttaattgtctgcatgggactggtcgcaatgtcagttggcttgcgtaatagtaaaaaagcccccaattttgtgcgacaattcggcaacgatgtcgtcggtattacgaaccaagtcgtgagcgttccggcgaacggtattggtcacggcgtcgacgccttaacagatctagtgaacacttatcaagaaaataaagatttaaaagcacaattggatgatttagctcaaaccaaggtgcaaacgcaaacgttaaaagaagaaaatgctagtttaaaaaaggaattaaaattaaaagggacgctaaccgattatacgacggtgacggcctcggttttatcgcgtaatccggacaactggcaaaacgccttggtgattaataaaggcgctttggctggtttgaagaagaacatgcccgtcatgtctgaatctggaattattggtcgcatcactgaagtcaataaaacgaattcgaaagttgaattagtttcaagtaccagcggttcaagtaacggttttgcagccgttgttgatacgaaagacggtaaacaagtcaacggtatcatgaccggttacaatgctgatcgtaaacaattaaaactaggtcaaattaagaccgacaccaacattgccaaaggcgataaagtcattacctctggtttaggtggcttaacgcctaaagggttgtatattggtaaagttgcgtctgttaaaaaagatgattatggtctagccttaacggtctacgtcacacccgcggctgatttaaataatttaaccgtcgtgaccgtgattaaacgtacgattgaaggtgagtaagatggcgacaacccatttgaaaaatcgctatttattacccatttatataatgatcgccttttatctcgatggttcaattagtctcttaggccaaatttggctttacacacccgattacacgattattagtcggttgttcatgttagtgctcgttttagcggcgtttatcctgccagaagaaacgcgactaccatggtacgcaatcggaatcggtttaatttatgatttgtattatacggggatgctcgggatgtacacatttgccgtaccattgattatgtacgttgtgcggtatttaaaacagtatttaccagattcaccgttttttatcgcgttggtttatctgattagtttaacgttgttagaaaccgtcatttacctattcaatcgaatggccggcattgtgacgacgattccagttgactttatcagcaacgttttagcgccaacgattgccttgaatttagtattttttatctttttatatttgcctatcaagtatttattgctaaaattaaaatcagaacgataaggggtttgatttttttatggatgcagtcacattaagaggacgcaaagaaggatttgagttaaatattgacgcaggggctgatttcgatcaggccttgttggcgttggccgaattattaaccaaaatccgtcaggaacaaccaacattgggctccgataaaattgaattggaattaacgaccggcttacggctgttaaacgaagcacaagaaaccgccttgcaaacgacgttagcgcgcttcccagaattccaagtcaaccggattcaatcattagtgatgacgattgaagaagcgacggcgcaaagagaagctgatcggctccacgttgaaccaaacgtgttacggagtggtcaagaagtgaactacgacggcgacgtgttgtttgtcggcaatttacatcaaggtgcaaccgttaaagcctcaggcagtatttttgtcctcggggaagtcgccggaattgttcatgctggttatcctgataatccagaagctgtgattgctggggatttatcacacgcggtgcaattacgaattgcggatgcggtggaaattcttgatcataaaaaaaatcaattcactgcacaaagtatgagttacattaatgatttacacgtgattgattatggagcgataactgatttaaaacaaatcaatccaaaattatatcgtaaaatgaaggagcaataactatgggaactgctttagtgattacatcgggtaaaggtggcgttggtaaaacaacttcgagtgcgaacattgggaccgcactagcccttttagataaaaaagtttgtctgcttgatttagacattggtttgcgtaatttagacgttgttttgggcctcagcaaccggattatttatgatatcgtggatgttgcacagggtcgcgcgaagttacaccaagctttaatcaaagacaaacgttttgatgaaaaactatatttattgcccgctgctcaaaatgcggataaagaagcgcttgaacccgaagaagtgacggcgattgtcaatgaacttaaagaagaatttgatttcgtgattctggattgtccagccggaattgaatcaggctttaaaaatgcgattgctggtgctgatggggcgattgtaattgcgaccccggaaatttcttccgtcagtgatgctgatcgagtggttggtttgttagaagaacatgaaatgcaaattgcaccccgcttagtgatcaaccgaattcgccgccacatgatgaatgaaggcgaaacgatggatgttgatgaaattacgaagcatctatcgattccgttattggggattgtttttgatgacgatgcggtcattaagacgtccaatgcgggtgaaccaatcgttttagatcctaaaaattcagcgagccaaggctaccgcaacattgcccgccgtttattaggtgaaaccgtgccattgatgacgttaaaggaacggaaagtcggcttctgggcacgccttttcggtcgtaaataattaaactggttgacttttcagaaaatatcgactagaataatcacaatacttgaaactgtgaacggaccaaattaatttaagggaaacagagagctgacgtttggtggaagtcagaccgttaaaattaatggcacatccgtgagttgattatctgaaccaatagtaagataatccgttagcccgttatcgctgtagttttaaaactacataagtttagacgatgtgagtcgtttattaaactgaggtggaaccgcgataaattcgtcctcttggagtaatccgaggggacttttttgttgcatttagaactacgtgagttgttgattgtaagatcaacaagtatttgaggtggaaccgcgatcagtcgccctctttgtgtttaggcacgaagagggcttttttatttgaacgcttgaaaggagcacaatatgattcaatatagtttatccattttaccagctttgctaagtggtgccaaaatgacactggccatttttagtttaacggtcttaggttcgattccgttgggcctgtttttaagcttagggttagtagccaagtttaaaccgctcaattatttattgaatatctatgtttggttgatgcggggcacgccgttactattgcaattgatttttattttttacgggctaccggtcgttgggattgtctttaaccgatttgacgcggcgctattggcctttattctaaattatgcggcctatttcgccgaaatttttcgaggtgggtttcaagccgtcgatggcaatcaaattgaagccgctcatgtgttgggtttaacctatccgcaaacaattcgcaaaatcatcgtgcctcagacggttaaaattgtgttaccgtcagtcggcaatgaagtgattaacttaatcaaggattcatccctagtgtacgtgattgggattggcgatttgctacgggccggcaatgttgccagtgcgcgcgatgtcaatttattaccactggtgttagtggcgattgtttatctattattaactgcgatttgtaccggtgtgttgcgccaattagaacgctactatcgctattaccgttaaggagggtttcagatgtttcaattagtcaatattaatcaatcttttaaaggtcggcgaattttaaccgatttaaatttaacggtcgaaagtggccaaatcttggcaattgtggggcccagtggtgcgggtaaatcaacgttattacggttgatgagtgggttagaccaaccagacagcggtcaattcatcattgatggcgaagcctacgaaccgagtgcggctgaaaaagaaggccgaatcggcgttgtttttcaagatttccgattatttccacatttgtcagttttagaaaacgtcacattagcccctaaaatggttaaaaaaatggcgaaagcaacggcacaaacagctggtcaacaactattgacccaactaggcttagcgaaccagagcagtgcttatccatttcaattatcaggtggccaacgccaacgggttgcgattgcgcgagcacttgcgatgcaacctgagattctctgttatgatgagccaaccagtgcactagatccatcgctagttgaaagtgtggcgcaattaattctggatttaaaaaaacgtgaaatgactcaaattgtcgtcactcatgatattcaatttgcgcataagattgcggatcaaatcttcgaattacagccaaacgaggtttaacaatatgaagaaaatagtaacgttattgaccgtcttattcggcagcgtcttgttgctggccggatgtgggccaaaccaccaacaagatcagtgggccagtattcaaaagaaacaaaaaattgtgattgggatcgacgatagttttgtcccgatgacttatcgggctaaaaatggtcaactaaccggttttgatattgagttagtgcgcgccatttttaaaggcagtgggattaaaattgattttcaaacgattgattgggacatgaaggaaactgaactcaacaatcaaacgatcgatttgatttggagtggctattctaaaacggcgcagcgggctaaacgagtggccttcagtacatcctatttaaccaaccaccaaatgattgtctcacttaaaagccaaccaattaatcagattgccgatttaacgggccaaaaattaggcgttcaaaccggttcttctggtatggaacaattggatagtcgaccaacaattctgaagcagaagattgcacaaaagacagcaatcttatatgatacttataataacgcgtttattgatttacaagcgaagcgcatcgatgggttgttaatcgatgaagtctatgctgaatttgaaattaaagcgcgtcaaaatggggccgattttcaagcgattgaatcgccgtttgcagccgaacaatttgcggttggcatgcgacctcaagataaaaaattacgccaatttattaatcagcgctacgcgaccttgaaagccaacggacaactagcaaagattcaagcaaaatggtttaaaaagtagggtgaagtgagcatgacagccatcgttgtttggggcatcgtcatcattgttgtggtgaatacgtttggggccattatcacggtattccggcaacaacgggatattgcggcgacttgggcgtggttattagttttaattttattgccaattgttggttttattttgtacctcttttttggtcaaaaaatatccgaagaaaaaatttatgatttaaaaacgcaagctcggctcggaattgaccaacgagtgactgaacaaaaagagcggatgcgccaattgaaaacgcaagctgaaccaacgctatcccctgaaatccaaagtctaattaaccttttcttggtgtcgaatacggcggttttaacgcgcgaaaatcaggtgtcggtcttaacggaactacctgaggcgtatcaacgcttattaattgatattaacagtgcacgtgaccatgttcatctcgaatactacgccttctttgaatccgctcatgggaagcaactggtcaacttactggcttataaggcccaacagggggtcaaggtccgcgtaatttacgatgcgtttggttctcagaaaatttcgcggcatttttttaaacccttactgaaagcgggcggacaagtgacaccgttttttagctctaaatttcggttcattaattttcggtttaactttcgaaatcaccggcaatttgcgattattgacggtaataccgcgtttttaggcgattttaaccagtttaattattaccgtggctcattagcccgggatacccgtttaaagatcaccggtgatggcgtattatcctttcaagcccgtttttttatggactggaatgctgcaacgcgtcaatccaaagtttattatagcccagcctattttccaacgtcggctgaacacgggacgactaatatgcaactcgtttctgggggacccgatcgagaactgcctgaaattaaattaggtttcttaaaaacaattgcggccgctaaaaaacgattgtggattcaaacaccgtattttattccggatgattcggtattggcagccttagtgttagcgattaattcgggggtcacggttaagattatgattcctgaaaatccgaaacaccgactagtccatcaggccaatctctactatgcacgccaaattgtgagagccggcggacaggtctatttataccagtctagtggcttccgcgtgcgcgcgatgatgattgatggtcaactagcagcaatcggcacggctaacctagatatccgcagttttaaactgaattttgaaacgacttgtttcttatacgatccatccttaacgacccaattagaacaagattttcaaattgatctcaagttatgcttaccgttaaccaaacagcgtctggcacaacagacgacgagtcaacggatgagacaagatctcgctagactattagcaccgattttataaatcaaaaaacagcgaaccatccaagattgattggacggttcgctgtttttgattatttaaagtaatccgttaaaccgttataaacggctgttgcgacttgttcttggtaactactgctactaatgtaattaaaatcagtatcgttgttgatgtaacctaattcaagtaagacagaagggcgtttattatcacggagcacttggtaattgccgtattcaatcccacgattagttaacggcaaggttttcgtctgcgcattaatcgctttagccagcgtgttatccttgctgcttgaatagtaataagtcgtggtcccactggcttcattggcattagtactcgaatcaaaatgaatactaatgaacgcatccgctttaattttattagcgacaaccggtcggggggcgagatcgataaacttatcagatgatcgcgttaagacgacgtttgcaccagccgcccgtaatttcttcgcaattgcgttaaccgtttcaagcgtgtaagttttttcatacttatcacccgttgaaagggcaccaacatcactaccaccatgaccggcatctaagacgattgtggcttcagaaagggaagtggcacttgttttgacgacttcatcggtagcggatggggtcacgacccaactggcaacataaccggtattcccgtcagcatccttaacttgataccataaaccactcttactaacataggttagcttggtattggcggcataggttttggaatagtcgtaagtcgtggcgggaccgctgcgtaacttcgtatcattcaactgcgtcgtgactgattgaatatcggtcgatgtttgcgtggttgaactagaatcagcggtggtggttgttttttgaaccgtcgttggggcattatccgtgacactaattaaactactttggacccaaccaacggcgttattatatttaatctgactccaaccattctgttgatacaagacggtaatttgatcacctttatttagttttcccaataactgacttgtcgaattgctactcttgcggacattggcaaacgtataggtgaccttggccacccggttagaggttgcactgacttcggtattgtcgactaaccaacttgcgacccaaccgattttatcaccacttaaacggacctgataccaattatttttctgggaaatgacgttcattgattcgcctttactcgcttgttccatcacatcatacgataatccgggaccctgacgaacattgacgacgtttgctttgattgtaatttgttgataagtcgctagaacatgtgtggcaaaaaggcccacaccaacgatgattaacaacaatatgacggctggatagcgtttcagccaattcaaaggtttttgcatttcttcaacacctttgttaattttattttagtaggtaattcatattattaattatagcaaaaatccgcgtattctaaagggataagctaaaaaaattacaaaaaattcaagaaatattgacttttagcgcaaataacgttaatcttatagcaacagaataacttatgaccgttgatggagcaataataaaccacccaaacagagagatttcaatgctgaaagaaatcacgtggcacctgacagcttttgaggttcgtgtttagcaataaacaccgttggcaacaacgttatgatcaagcaaaaattaaggtggtaccgtgcagattaagcacccttgttcaacaacaggggtgcttttttgtttggtatctattttggaggaatgaaagatgggctatcaaaagccaaaaggcactgctgacatcttacctggcgaatccagccaatggcaacttgtcgaaaaaaccgcacgtgatatttttaatcgttatcaatttaaggaaattcggacaccgctttttgaaagctatgatgttttctcacggagttcgggtgatacatcggacattgtcagtaaagaaatgtatgactttatggataaaggtgatcgtcacatcgcactccgtcctgaaggaactgccggcgttgtccgggcctttgttgaaaacaaactctacggtcctgaacatcaaaaaccttacaaggtctattacatgggaccgatgtttcgttatgaacggccacaatcaggccgtcaacgccaatttcatcaaattggggtcgaagcctttggtgctgatagtcccgcagtagatgtcgaagtcatcagcatggcgatgaccttgttgcgcgaataccaaattaccgatttgaaactcgcgattaatacgttgggtgatgcggatagtcgcgcggcttatcatgaagcgctcgtcagatatttagaacctcattttgacgaattaagtgctgattctaaagtccgattgtacaaaaatccattacgggttttagatagtaaagatgccaaggatcaagaaattgtgaaagacgcacccattatcttagattacctaacggatgacgctaaggcgcatttcgcgacggttaaacaactattggatacgctaaagattccgtatgaaattgatactgaaatggtgcgtggtctagattactataaccataccatttttgaaatcatgaccaacaataaggtgctcggtcgtggttatacgacgattctagcgggtggtcgttacaacgggctagtcgaacaacttggcggtcctgcaatggccggttgtggatttggtttaggcgttgaacgcttattactcctaatgaacgcccaaaatgaccaactagtggttgaagcgccattagatgcttacgtggttgggattggaattgaaaccagtccaacgactttacaaattgttgaaagtattcgccaagctggctttacggcggatcgtgattatttagatcgcaaacctaaagcccaattcaaaaccgctaataagcttaacgctcaattagtgattacgattggtgaatcagaattagaagaacaaagcgcacacgttaaaaatatggtcagtggtattgaaattacggtagccatggctgacttactaactgattttaaggcagtccaagcacaaattgctgcccaaggagagaatgcataatgaaaacagggacaacttacaatggtttagttaacgacagttttatcggtcaaacagtgaccttacacggttgggttcaaaaacgccggagtttaggcaatttaatcttcgttgatcttcgtgatcgcgaaggcatcgttcaattggttttcaatcaggatcaacctgaagtattagccttggccaatacgttgcggaatgaatacgtgattgaagtcactggtttagttcaagcccgtgatgcagctgcgattaatccagacatgaagactggtaaagttgaagtcgtcgttagtgaattaacgattttaaatgaagccaagaatttaccgtttgaaattaaagacggtattacaacggctgaagaaacgaaattaaaataccgttatttagatttacgccggcctgaaatgcaacaagccatcattcgccgttctaagattacccaagcagcccataaatacttggataacaacggtttcttaaacatcgaaacacctaatttaacgcgttcaacaccagaaggcgctcgggattatttggtgccttcacgggtttatccaggcagcttttatgcgctaccgcaatctccccaagttttcaaacaattattaatggatgctggctttgatcgttattatcaaatggcccgttgtttccgtgatgaagatttacgtggtgaccgtcaacctgaatttacacaaatcgatgtggaaacgtcatttatgagcgctgaagaaattcaaacgcaagcagaagggatcatcaaacaagtcatgcaagatgtcatgggaattgatgtaccaacaccattcaaacgcatgaactggcaagatgcgatggaccgttatggttcagacaaacccgatattcgttttgatttagaaattcaagatttaaccgacatgatgaaaaccagctcattcaaggtcttcagcgagactggcaataatggtaacttggtccgcgccatcgttgttcctggtggggctgaaaagtattctcgtaaaaagatggatgaacaaacggattacatcaagcgttacggtgctaaaggcctcgcttgggttaaagtggccgatggtgaattaaccggtccaaccgctaagttcttaaaggaacaaacgagtgaattattaacgacgttatcggccaaagatggcgatttaatcatgttcgttgccgataaattccaagtcgtttgtgatagcttaggttatttacggaaacactttgcccatgaaatgggcttagtcgatgaatcacaattcgcttatctatgggtcgttgactggccattattcgaatacgacgaaggttttggtcgctggattgcagctcaccatcccttcacgcgtccgaacgataccgatattgatttattagagacggatccgcataaagcccacgcgcaatcatacgatattattttaaatggttacgaattaggtggcggttcactccgtatctatcaacgtgatgtccaagaaaagatgtttaaagcgttagatattacccctgaaacggctgaagaacaatttggtcatttattaagtgccatggattatggtttcccaccacatggtggctttgcgattggtttagatcgcttcgccatgttattatctgatcgtgataacatccgcgacgtcattgctttccctaaaaattcacacgcctcagaaccaatgacgagtgcgcctagtcgcgtagctgatgcgcaactagatgaattaggtttggaagttgaaccagaagttaaagcagaattagacaaataatggagtgctgactcaagttggtcaggctttgaggattaacctaaaaattagcgttatgatttgtactttgaatcataacgttgattttgtagttaaccggaaaagcctacttgagaagcacgttatcatggcctatcaaactgaaaaatccgcttatcctgaatttagggataagcggattttttgatttgaacggaaattgatgagttctgacgcgtgttaacgagaaatgttcgtttagatcaggatactgagatttctgtcacagcttggcccttttttgagcagattaatcgtatttcaccgctgaatggttataattaggaacacaaaggggtgttgtgtgatgtcagaagacttaagaaaccaattaacaccagaacaatatgcagtcactcaagaaggtgcgactgaagcaccgtttactgggcaatatgatcaattcgatcgacccggcatctacgtcgatgttgtcagccatgaaccgctatttagttcactcgataaatacgatgccggctgtggttggccgtctttcacgaaaccgattgaaaagctggctgaaaaacgcgatcaatccttcggcatggaacgcgttgaagttcgtagtcgtcaagcgaagtcccatttaggccatgtttttaccgatggaccccaagcacaaggtgggttacgctattgcattaattcggccgctttaaaatttgttccgctggctgagctagaacaagctggtctcggccaataccaatcgctatttgaaggaggtcgtgcatgatggcagtcgagaccgcaatcttcgcaggaggttgtttttggtgtatggtgaagccgtttgaccaacaacccgggattttaaaagtcgtttccggttatactggtggccacgtccccaatccaacctatgaacaagtctgtacccaccaaacgggccataccgaagccgttgagattacttttgatccggccattatcacttatgcgaatttagtcgaaatttattggcgacagactgatcctaccgatgcgatgggtcagttccaagatcgcggtgatagctatcgaccggttatctttgtcaattcaaaagcccaacgaacgattgcgacggcgtctagaaaagccttagtggagagtggtcgttttcaagcgccaattgtgactcaaattgaaaccgccaaatcgttttatccagcggaagactatcaccaagatttctatcagaaaaatccattcagagccgaattgggtgaaattcaacgtaaaaaatttattcatgagaattggtccgattaattctaataaaacctttagtattaactgatgatgtgctagaatggtagacatcaaaagtgaatgataggtgattattaagtggacgatctagcacggaaacatcaaaatatggccaagatttcggcggccattttatacgggatttgtgtctcaattgcattgaattttttctgggaagaaggtggcgtttacgcctcgggcattaccgggttcgcgcaatttattcatacggtaaccgggcgttttatgccgtttacattatcaacgtctttgatgattttcttgttaaacgtaccactatttattattgcgtggtttaaaattgggcaccattttacaatttatacctttatagccgttgttttctccagtatcatggttcagattatgccattgactcaattaacgactaatccgatcatctgtgcgatttttggggccgtcattaacggcttcgggactgggacggcgttgaaaaatgatatttcgaccggtggactcgatattattgggattgtcctgcgaaagaagaccggacgttcggtggggacgataaacattatctttaatgtgattttagtcttcgccgctggcttcatcttcgggtgggaacatgccctttacagtatcttgagtatctttgttaatggtaaagtaatcgatatggtttatacgcgtcaacaaaagatgcaggttatgattattaccgataatcccaaagtcgtgattcaaatgattcaagacgaaatgcgtcgcgggattacgattgtccatgatgttgaaggggcgtataatcgtgaagaaaaaacaatgctctttacggtcatctcacggtttgaaatgcatgatttagaaaccgtcatgaaaaaggccgatgatcacgccttcgtcagtattaccgaggcggtcaaaattatgggtcatttctacgaagctaaaattaaataaacgatttaaacagtcaattcatcttaacggatgcgttggctttttttaatgacactattttgtggggctaactaatttaacgaatggacgggttaattgacaaggtatcaaatttaaatttgaaacgggcttaaaatccgtctctcagcattcagtgttgaacaacgccggtgtatcaaccttctgtcagaaatgaattgagttgatttgagcgcacgcttttggataaaagcgtgcgctcaaaaagctgttaaatcaacgattataaggcgtgcaaaaagtcaccgcacggtttataataataatgagtaaaagcgtgcgttaaaaccaaggagaattatggctaaaaaaagacgaaaacacaatacgatcaatgtccaacctttacggacaaatgacgatattgaagatatgaaagttattttacgacacatgacgatgggcccccgtaatcagttattatttctggtcggcatcaataccggtttacgctgttccgacattgttgaactgaaggtcgagacggttaaacaggataatccgttaattcgtgaaaataaaacgggcaagtggcggcaaattagtttggtggcgttacggccctatatcatgagttatctggagcaagcggaactcgctgattcggattggttatttccgagtcgcgtcggtgacggccatatcacgcgtaacggtgtttatcgttttttaaacgtcgcagcggaccaattaggtcggcatgatatcgggacccatacgatgcggaaaacgtatggttattggttctacaaaaaatatggtgacgtgcgatcgttaatgattgattttgggcacgcttcacaggaaattacgttgcattatattgggattacccaagatgaagtgctacagaagaaacaacaactcttgattggtttgtaatttaataggaaagtatccaaaaaggggccgattttattttaaaatcagtcccttttttataggtcaaatcttgcattttaaaccgctatctgtgacaatcaaagtatcaagcaattcatggaggttgtattatgttattaggaagtcacgttagtatgaaaggcaaaccgatgttactcggttcagccgaagatgccgctcaatttggggccaatgcgtttatgatttatacgggcgctcctcagaatacccggcggaaaccgatcgaagaactgaatattgacgctgcgaaagcgtatatgactgaacaccaattgggtccaatcgtggtgcatgcgccctatatcattaatttaggcaacacgattaaacctgagaactttaagttcgccgttgaattcctgcaacaagaagttttgcgagctgaagccgttggggcaactcaaatcgtcttacatccgggcgctcacgttggtgcaggtgctgacgcgggtattcaacaaattatcaaaggtttaaacgaagtactccgaccagagcagatggcgcacattgcgttagaaacgatggcgggtaaggggaccgaagtcggtcggtcgtttgacgaaattgccaaaatgattgatggtgtcacgtataacgaaaaactatcggtgacgtttgatacttgtcacaccaatgatgcgggctatgatgttaaaaataattttgatacggtgctcaatcaatttgatcagattatcggtctcgaccgcttacaagtcgtccatctaaacgattctaaaaatccgatgggtgcgcataaagaccggcacgctaacattggttttggtgaaattggctttgacgctttaaatgcaatttgtcaccatccccaattaacgaacgtgcctaagattcttgaaacaccctacgttggtgcggataagaaacataattttgcaccctatgcttatgaaattgcgatgcttaaagcgggtcaattcgatccagatttactgacaacaatcgaagctaatgaaggtcagctatgaaaaccggccgattgattacttggctcagtttactgggatttatcttcctcgcgaacggcataaaaccagtccaagccgctgatacctataagattaaccaataccagacccaggttaatgtccaatcggatgggagcgcgcaagtcgaacagcggattcgattcaagattgaagacgatattaacgggatttacatcaatcaggatttaagcactaaaactggcaaaacaaaacagctcgaacaaccgcaaattagcgtcaatcaacaagcgtttacggccggtggcaatcaagcgggacaatacgaattaaccaatgatcaacaggtttatcgttttaaactctatcaaccggcgaccgatggcgatacgttaaacgtggttctaaaataccgtttaaccaatttaatcattaattatcgcgatacggccgaactgaattggcgggtgattgggactggttgggatagcgatttagacaacgtcgcaatcaccattcaactgcctaaaaagttggctaaagatcaattgaaatcatggacacatggtgatttagccggccagcaagttgttgatgcagctaaaggtcaggttaaaatcatgctagatagcaacccggccaatcaaatgttggaaagtcatctgattttcccaacgagtgttacggcgactaatccgaatcggattgatcaaaataaacgggcggcgattttgaaagctgaaaaggccttagccgaaaaagcgaatcgacaacgccaaatgcaacgtaaaatggttgtgattctttcggtgatactggttgtgattgccccaattggcatctggttgattgcgcggcacgtcaaaaaggcgttaccgaaacaatcttacagtaccaatcatcccgagcatgtttatgaattgccggatgaaaacggccccgctgtcgttcaatatttattgaattatccaggaactaaagacaccaaaaccgatagtttatcagcgacgattttagatttagttgcgcgacgacacttagcgattaaagaagttcccgcaacgacgggcctgtttcataaaaataaagtgacctatcaaatacagttgattgatcaaacacaactaacgcaatcagaacagtcactcgtgcattggttatttgacatcattggtgatcaaggccaagtcacgttggaacaagttgaggcctatcctaagaaacataatcaagaacgctttttgaaagcgtacaaagcttggcaaacggctgttcaagaagaagcggtccaaacgggttggctactggctaaagcgcaatcaacggtgacgtatgtcacgggctggttagtcgttagtgttgttttattagtggcgagcattggtggttcgttaattggtttgctgttaccttggactatccttagtagcgttatactagttggttattgtgcttggcaactcaaacatctgaagctctggtcgacaattggcgatcaaaagcgctatgaatggttagggttcaagcaaatgctcaaggatattacgagtcttgatatggcggcggtgacggacgtcattttgtgggaccgttatctcagttatgcgactgcttttggggtggctgatcgcgtgattaaagcgttaaaagtccaattcagtactgaagtcattgcgaccatgccacttggttattattatggtggcttctatggcgtcaatatgggtcagtcgttcaatcaagccctcgatcatagttttagtacggctttcagtgttgctaacgctactagtgcctcaggtgggtccggcgggttctccggcggatcatcaggtggcttcggtggcggttctggcggtggcacattctaaattgagtaagtgtgttgagttgcgggtagcaactgagcattaacaaaaatcaccagttatcttgaacttaagataattggtgattttaggttaagcggaggttgttgcaactcaaaagcacgttaaaaatagaagtgtccacacccacggtttgattctgagcattagcctagtttcgtgaataagtccggtctatggacttgtttatggaacgtcgctaagcacgttatcaattgcctatcaagttaaaaaaagctgattatcccgaattgtcaggataatcagcttttttggtgtgactgcttaaaaattggcgtgatggttaatcggtccgaaacggtgaccaacggcaattggattagcaatcgccgtatggacgaattttttagcggtgcggatggcagcttccaccgaagcccctttagcgatttcggcacagatacaagccgataaagaatcaccagtcccgttaatatgggtcgtttgaatataatcttcggttaaccagaactgttgaccatccgctaattggacgtaatcactaattatcgtttggttttcagtgtgttggcctttaattatgacgtttttagcgcccatcgccatcaattgatcggccgctaatcggtaatcggcgggggtcttaatcgtgagattggttaatttttgagcttcatagaagttgggtgtaatgacggtcgctaacgggattaattgggcttttaaagtttcaaacgcggcatcttcaagtaatagggcaccgtgtttcgtgacaatcaccggatctagcactaatggtccgaaatcatactgttttaagttagcgacgaccgtctcaataatcgcggcatcgtctaacatcccagtcttacaagcccgaactttaaaatcatccgcaatcgcttgaaattcagtatcgataaacgcattcggcaaagagtgactggcgtgaatcccatatgaattaccagccacacaggcggttaaaacactcatcccataaacatgacgagctaaaaaagtatttaaatcggcttgagcaccggcactcccgtcggaatcggaaccagcgatggtcattacttggggaaaatcatttagcattagcgcgacctctctttttttaacgacttaaggaacatactttaaagtataagcgtttattgctaaatcacaaacattatttaacctaattatgctagtttcgggtatactaacgatatagattataataattattatctggaggaagttatgggacaactatgcattaaagacgtcagttataacgttgatcagcaaccgattttaaagtcgcttgatttaacggtagcatcgggcgaatacgtcacgctgacgggaccgtccggtagtggtaaaagcaccttattgaagttaatcgccagtttattaacaccgacgagtggcacgattcaagtagataatcgtcaaattgagactatcgcacctagcgaatatcgcaagcgggtttcttattgttttcaacagccgactttatttggggaaacagtggctgataacctgaattttccgttcgagattcgccaattaccagttgaccatgatttaattttagaacggttacagcaagttggtttgaccgccctttatttaaccaagcaggtgaccgccctttctggcggtgaaaaacagcgtgtggctttaattcgcaatttattattcaaaccggaagttttgttactcgatgaagtcacgactgggttagacgccgctaataaagcgattgttgatcaattaatcactgattataacgaaattgaaggggtgaccgtcatcagtgtcacccatgatcaacaagaattacaacgaaagggccgccagttaaccatggttgctggccaatgggcaactactcatgaatctagccgttaatccgttatcgttaacttttgcaatttccttagtttttgtcgcgttaatcatcagcttccatgaaaagattggtctagaaaaagaccttgttttcagtgtcattcgggccgtgattcaattaatcgtggttggttacttattaaaatttatttttcacatcgatcacgtttggctgacgttaatcatgatgttgattattatcggtaacgccgcgttgaatgcgcgtaaaagagcggctgggttacgcaatgcgggttatatttcgctaatggccattatgacgagtactggggtgacgttggggctacttgtgttatctggggcgattaagtttatgccggcgcaaatcattccaattacggggatgattgcttcgaattcgatggtcgcgattgggctcagctatcggagtatgttgaccagttttaaagatcaacgccaagccgttttagaacggttagcattgggggctactttgaagcaagcttcgattgcaattgtccgcaatagtattaaaacggggatggcaccgacgattgattcggctaaaaccgtcggattagtcagtctaccggggatgatgtccggtttgatttttgcggggattgatccagtcaaagcaattatgtaccaaattttagtgacgtttatgttgttatcggcgacgagtttaggttccgtgattgcttgttacttagcctaccattcattctacaatcagcaacaacaattgattgatatgacgacaaataaaaaagattaggccaacgcctaatcttttttgcttttatttttgaaccaataatagagaccaaaggggactaaattttcagttccttttctaatccgttgaatattttcacggtgtcggtagaagaagaagagtaaaacaatcacggtaatcacttctaatagcggatcttgataatacgtaaaggcaatgatggtcactaaggtaatgcctagcatactcgcgatactgaccatactcgtgattaaaatcaaactcacaaaaatggcactcgcaattaggaagaagggtgggttatacgcgagtagaatcccggcacttgttgcgaccgccttgccccccttgaatttaataaaaatagagtaggcgtgaccgaagaccgccgccatcccgacaatcagaattaacgaatgactgtgtaaattaaagatgattggcaagctagcggccaacgtcccctttaaaatatctaaacataagacgactgtcccggcgattgggcctaaaacccggtaggaattggtggtcccaatattatgactgccagcatcgcgcggatctttatgacagaaaacccggccaataatcaccccggatggaaaggcaccgattaaataagctaagataaagataagacctaatttcatataaaaaactcctagtaaaccgatttgttttattcattctatcattttgacaaaggaaagtgaatattgtatgttagaatagattgctacgaacatacatttggatgtttaatcaatttgaaattagggattgtcaaatcactaaaagttgttgataatataacttatctgtttatttttaaacgaaggagtcattcttgaatgccaaaaaaacaagattataacgatagttcgattcaagtcttagaaggactcgaagcagttcgcaaacgacctggtatgtatattgggtcaactgatggtcgtggcttgcaccatttggtctacgaaatcgtcgataacgcggtcgatgaagccttagcggggttcggtgctgaaatcaacgtcacaattggcgctgacaacagtatcagtgtccgcgatcatggtcgtgggatgccaacagggatgcatcaatctggaattcccacgattgaagtcatcttaactgtattgcatgccggtggtaaattcacccagaatagttacaaaacttctggggggcttcatggggttggtgcgagtgtcgtcaacgccttatctgaatggttaaccgtccgcgttgtgcgcgatggtcaagcttatgaagaacgctttgaacagggtggccatccagtgggtaccttgcaaaaggtcgggaaaaccaaagaaaccgatggcacgttaattagttttaaacccgatgctaccattttccaatcaatcacctataattataatacgttagcggaacgattacgggaatcagcctttttattaaaagacgttaaaatcacgttaactgatttacgggttgatccggccaaagaagagattttccattatccggaaggcattcaatcattcgtcgattatctgaatgaagacaaagatacgattggcaataagctatactttgaaggcactaaagaagacatcgaagttgaatttgccggtcaatataacgacggctattctgaaaacatcatgtcctttgtcaataacgtccgcactagtgatggtgggacccatgaagccgggatgaaggctggtttaacgaaagcgtttaatgattatgcgcgcaaagttaatctgctgaaagaacgggataagaacatggaaggttccgacgttcgtgaagggttgagtgccatcctgtccgtccggattccggaagaattattacaattcgaaggccaaactaaaggaaaactgggctcaccacaagcacgaacggccgttgatagcttgatttatgaacaaatgagctttttcttgttagaaaacggcgaatttgcgcaagccttggtccgtaaatcgttaaaagcccgcgaagcgcgtgaagcggctcgtaaagcgcgtgaacaaagtcggaacggtaagaagaagaaagcttccgatgggttattatcgggtaagttaaccccagcacaatctaaaaacgcggctaaaaatgaactctatttagtcgaaggggattctgccggtggttctgccaaacaaggccgggatcggaagtttcaagcaatcctaccgttgcgggggaaagttttaaatactcaaaaagcgaagttaccagaaattctcaagaacgccgaaatcaatacgatgatttatacgattggtgccggtgttggcgctgaattcaaagttgaagatagtaattacgataaaattattattatgaccgatgccgataccgatggtgcgcatattcaaattctattgttgaccttcttctatcgttatatgcggcctttaattgaagccggtaaagtctacattgccctccctcctctgtacaagttacaaaaaggggccggtgctaaaaccaagattgaatatgcttggaccgatgaagaacttgataaattaaccaagggtatgggtaaaggttatagtttacaacgtttcaaagggttaggtgaaatgaacgccgaccagttatgggacacaacgatggatccggcgactcggacgttaattcgagtgcggattgatgatgcgtccttagctgaacgacgagtgaccacgctaatgggtgataaggttgaaccacggcggaaatggattgaagaaaacgtcaaatttacattaaccgaagatggtagtattttagagaacactaacgccccagccagtaccccaactgaaccaactaatattgatttgtttgaacaattagacgaatagaaaagtgagtgaataatttggctaatgacacacaaaaaattcaagaattaacgcttgaagaagtaatgggcgaccgttttggccgttattcaaaatacatcattcaagaacgggctttacccgatattcgcgatggtttaaaacccgttcaacgccggattttatacgcgatgtcgattgacggcaatacgtatgacaaaggctttagaaaatccgctaaatcggtcgggaacgtcatgggtaattttcatccgcatggtgatagctcgatttatgaagcgatggtccgcttaagtcaaaactggaagttacgcgaaccattgattgaaatgcatggtaataatggttcaatggatggcgatccaccagcagcgatgcggtataccgaagcgcggttaagcaagattgcgagtgagatgttgaaggatatcgacaaaaagactgtcgattttgttttaaactttgatgacaccgctgaagaaccaaccgttttaccagcccgtttcccgaacttattggtcaacggtgcgaccgggatttcagccggttatgcgacggaaattccaccgcataacttgggtgaagttacggatgcactcctttacttaatcgatcatcccaatgctgacttaaccaagatgatgaccttcgttaagggccctgattttcctactggcgggattattcaaggggttgatggaattcgcaaggcttacgaaaccggccgtggtcggattgcggttcgttctaaaaccgccattcaacaattacgcggtaatcgggaacaaatcgtcatcagcgaaatcccgtatgaagttaataaagcgcaaatggttaagaagattgacgaactccgtgtacttaaaaaagtcgacggtatttctgaagtccgggatgaaagtgatcgaatggggctttccgtcgtcattgaacttaagaaacaagcggatagccaagggattttgaattatctcttcaagaatactgatttacaaatcacatataactttaacatggtcgctatttcacagatgcaacctaagcaagtcgggttattggagattctacacgcctatttggatcatcaagaagacgtcgttacccgccgaacgaagtatagtttgcaaaaagccttggatcggcaacacatcgttgctggtttaatcaaagctttgtcgattttggatcaagtgattgcggcgattcggagcagtaaaaataaaaaagacgccaaagatcatttggtggcccagtttgatttttctgaagcccaagccgaagcgattgtttccttacaactgtatcgattaaccaataccgacgtcacggcactcgaggccgaatcggccgatttaactgcagccattgaatcctatcacgcgattttaagtgatccaaaggcgttagctcgagttgttaagactgaattgcgctcagtggttaaggcctatcgtaacgatcgactaacagccattgaagctgaaattgaaacgcttgaaattgatacgagcgtcaccgttattgatgaaaccgtcatggtctcaatcagtcatgatggctatcttaaacggagtagtttacgctcgtatcaagcttcggatgggaatagtggtttgaaagacggcgactttgctattttacaaaagccactccaaaccctagatcaattgatgctcttcaccaactatggtcatttaatccaacggcccgttcacgaaattgcggacttgaaatggaaagacatgggtgaacatatttcgcaatcaatcggtttagcggccgatgaagcgattattgccgcctttgcctttgaccaaaacgaacatgcgggtcatttcgtcattggctcgaccgatgggtacatcaaacaaaccgaattttctgatttgttaccgagtcggacttatcgttctaaagctcaagattgtatcaagttacacgcggacgctaaagtcacgaacgtttattgggtggctgccaacgatgagtctcagacggccgtctttagtgcgagctaccatggttatggcttgagctttgaattggctgaagtctccgtatcgggggctaaagctagcggtgttaaactgatggatcttaaaccagatgatttcgttgctaactttacgttattcaatccagaccgtaaacaagcctcagttgcgattttaacgcaacgtggtgccttcaaacggatgatgctgagtgaagttaccttaactagtcgcgcgcgtcgtggcgtgctgatattgcgtgaattgaaacgcgatccacaccgagtggtagcgatgagtctggttacaccgggtgctgaattgttaatccaaactgatcaacagttaatcacgattaatccgcagactcatgtcacaggtgatcgttattctaacgggagctttatttttgatattgatgaagtcggaacacctgaatttattttgacggttatgccggaaacgaatgatcaagattaagcacgattgaaaaaagccatccttgtcgggtggcttttttctgttatataaaaataccgtataaatcgaaactgtatcataacagataactatgttttacacaatctaatttcaggacaagcgcgattgtcctttcactaaaaggttgatacattagtgttctagtccgaagacgatgcctataaaattttataaaagaaagggcttgcaaaaactttgtgacgtgttatactatatttgtaaaaactgttataaacgaattcaattaacggaggcaatcctaatggcaaaaactgaagaaatcaatttaaaagaattttgggatggatttaacaaaggcgactggcaagaagaaatcgacattcgcgactttatccaacataactatacccaatatgaaggggacgaaagtttcttagcgggtccaactgatgcaacaacaacattgaatgaccaattaatggacttgaagaaaaaagaacgtgaagctggtggcgttttagatgctgacaacgacattcctgcaacggttatttcacatggccctggttatttaaacaaagatcttgaaaagattgttggtttacaaactgatgcaccgcttaaacgtgcgttcatgccatttggtgggattcggatggccgaagatgcgcttgaagcatacggctacaaagttgatccaacacaacacaagatttttactgaataccgtaaaactcataaccaaggggttttcgatgcttacacacctgatatgcgtaaagcacgtcattttaagattatcactggtcttcctgatgcttatgctcgtggccggattattcctgatttaccacggattgctgtttacgggattgatcgcttagctgctgaaaaattcagcgattttgataatattggcgacggcgaaatgaccgatgatgtgattcaattacgtgaagaaatcaatgaacaatatcgtgcgttacaagatatgaagaagatggctgctagctacggttttgatatttctaaaccagcgcaaaatgcacaagaagccatccaatggatttactttggttacttagcagctatcaagactcaaaatggtgctgctatgtcagttggccggattgatacgacgattgatatcttcatccaacgtgatttagatcgcggtttgattactgaagaacaagcgcaagaaatggttgatcatttcgttatgaaattacggatggttcgctttatcagaactgaagattacaattcattattctcaggtgatccaatttgggcaaccttatcaatgtgtgggattgggatggatggtcgtcaccacgtcactaagactgctttccgtgtcttgaagacccttgaaaacatgggcgctgcaccagaaccaaacatcacgttactttggtcagatcgcttaccagaaggtttcaaacgttatgccactgaagtctcaatcaagagctcaacgattcaatatgaaaatgacgacttaatgcgtaaccaatggggtactgattattacgggattgcttgttgtgtttctgcacaaccaattgcaaccggtgttcaatacttcggcgctcgtgctaacttggctaaaacaattctatacgccatcaatggtggggttgatgaattagccaagaaacaagttggcccagcttacgaaccaatttcaagtgacattattgattacaaagaattcatgggtaaatacgataagatgttagattggttagctgatatctatgtcaatactttaaatacaattcactacatgcatgacaaatactattatgaatcagcacaacttgctttgaagaatagtcgtttagatcgcacatttgcgactgggatttctggcttatcacacgccgttgattcaatctcagcaattaaatatggtcaagttaaagtcattcgtgacgaagatggcatggcgattgatttcgaagcacaaaaccctgactacccacgttatggtaacaatgatgatcgtgctgatgatatcgctaaatggttagtgaagacattctacaacaagatgaacacacatcatttatatcgtggttctaaattatcaacttctgtcttgacaattacgtcaaacgttgtctatggtaagaataccgggacaacacctaatggccgtcaagctggcgaaccattctcacctggtgctaaccctgcatacggtgctgaaaagaacggggctttggcatcattattatcaactgccaagattccttatcgttacgcaactgatgggatttcaaatacattcggtgtgacacctaacacattaggtcatgatgacaacgcgcgtaaagatgctttggtcaacatggttgatggttatatgacgaaccaagggatgcatttgaacatcaacgtcttcaataaacaaacattgatggacgctcaaaaacatccagaagaatacccaacattaacggttcgggtttctggctactgtgtctacttcgctgatttgacgaaggaacaacaagatgatgtcatttcaagaactttctttgatgaaatgtaaagattaatacgggcagggggataagcgccatgcttatccccctttcttgtaaagcggccaattacgattgaccgttttactaggaaatgtgctttatttaagaggtggaagagatgaatattaaatttacaactaacttgtcaactgaaacagcaacaccaacggaagtcgtcccagttaaggacccagtaggctacgtgcattcaatcgaaacattcggttcagtcgatggtcctgggattcgatttgtcgcattcttacaaggctgtcggatgcgttgcgaattctgtcataaccccgatacttggaatatcggcactggcgatccatacacggccgatgaattaattgctaaggctttagactatagagccttctggggtaaagagggcggcatcacttgtagtggtggtgaatcactcattcaaatcgattttttaattgatttattcaagaaatgcaaggcacaaggcatcaatacgtgtttagacacctgtgggcaacccttcacgtataaggaacccttcttcagtaaatttaaggaactcatgaaatacaccgatttatcaatggtcgatattaaacacatcgatcccgttgaacacaaaaaattaacgggtttttcaaacgaacgcattttagaaatgattgaatacatgtctaatcatggtcaccatatgtggattcgccacgtcttaattccagaacggaccgattacgatgtctatttgaagaaattgggcgactatattcaaacgttgcattatgtggatcgggttgaagttttgccataccatacgatggggattgttaagtatgaaaagatgggaattaattatccgcttaaaggcatcgaacccccaacgcacgatcgcgtcgtcaatgctgaacaattattgcacaccgctgactaccataaataaagcggcgacataagctaaatttaaacgaataataagaaagagcgcaaaaggttgctctttctttatttttttattattataatgataagtgattctaaaaataacttaggaatgaggattgaacatgaaaacaaagcaagaaaatattttttcctccaagactttaacgtattttttgcaattagcagaaacgatgaactacacgcaagctgcacaattactgggaattacgcaacccgcattaacccaacaaattaagaaattagaacggacggttggtgcaccactcttttattctgtgggtaaaaaactccatatttcagatgctggccgaacaatgttagaagccacccatcaaatttacgatttattaaacaccgcaactgatgaaattcaaagtgcgaccagtgcgacacaaggtaaaatccacatcggcgttttggcctcgatggaagttagcgtgattgaacaatttttaattcaatactaccaacaatttacggatattgaagttagtttacacctgttaactcggaaagaaatctgggatcgccttgaaaataataaaatcgatctcgcaattatgtatttaccagatgacagtattaaaaattggaaaccgtataaatctaagaagattgccgaagaaagtttagtctttttaagccataatccaagtcttaagaaacgtaagaagattcattttaaagatacgttagaccaaaaatgggtgacttatccagatgaatattatttacaccaattcatcaatgaagcttataaaaaccaaatggttgaccgtccggttagtgcggctcaatttacgtcaccgtttgaattattacgttttgccgaagcgactgatttaagtacggctttgccaactagtttctttgaagcccataatcttggggtgacggcgcacgctgttcagtttgatcccgctattcaattcgaattggcctttgttttccgtaaagaaaaagaagcgattccaagaattgataacttcttccgtgaattcgatcaatatcttgctgaaaaagattatttaactcggattaaagaacaaaaccgccagattatctaatcttttctggtataatagatgatgtaattttgataaagaagggtctgtatattaatgagtaaagaattagtttttggacaccaaaatcccgatacggatgcaatcgttgctgcaatggcttttgcatacctacaacaacaattagggcacgatgttgaagccgttgcgttaggcgaacctaacgaagaaaccagctttgcattacgccattttgctgctagcacaccacggattatcaagacggcggcaaatgaagttgatagcgtgatgttagttgatcataatgaagctcaacaaagtgtagcggatattaaagatttaaccgtcacacacgtcgttgatcatcatcggattgcgaacttcgaaacgattagcccgttattctaccgttctgaaccagtcggttgtaccagcaccatcatgttgaaattattcaacgaatataaaattgaaattccagctcaattagcgggtctcatgttgagtgccatcatttctgatacattattaatgaaatcaccaaccacaactgatgacgataagattgccatcaagacacttgctgaaatcgccgacgttgactttgaatcatacggcttagaaatgcttaaagctgggactaacttagctgataagagcgaagctgaattaattgaagcagatgctaaaacatttgaaatggctggcaaaaaagtgcggattgaccaagtgaatacggttgatattgacgcagtctttgcacgtcaagctgcctttgaagcggcaatcgaagctgataaccaagccaatggttacgacttattcgttttattaatcactgacatcttaaatagtaactcagaagcattggtcatcggcgaacccgtagccgcttttgaaaaggcgtttaacgttactttaaacaatcatcgcgcacaattagacggtgtggtttcacgtaagaaacaagttgtcccacaattaactgaagcttttaaggcgtaattgacgctaaataaaatctctgcggaggttttatttttttacgtatattattaattaataatcattctaatctagttgaaaacatgctatactgatgttaatcaaacaagtgatatgaaaggtctgattactgatgaaacatacattgaaattctcactcacactactgattgggttcatggctctgattactgcatttctgttcaaacaaccattatgggcgcaaatcatcgttacgatggccggcagcctggtggcgttaagcatgatgattgaaatggttaaaaccttgaaatccggaaaatacgggattgatttattagcgattaccgccatcatcgcaaccttagctgtcggtgaatactgggcggcactgatggtgttggtcatgctaacgggcggagattcgcttgaagattacgctgcacataaggccggccgggaattaaaagcgttattggataattcgcctcagacggcccatttaatcgaagcggctggtctgagagacgtctctgtcgatcaattgcagattcatgaccaagtcctgattaaaccaggcgaattggtcccagttgatgggcatattctggatggccagtcgctattcgatgaatcctcattaacgggtgaatctcagccggttgaaaaggcaccgcaagatgaattgatgtccggttcagtcaacggcgacacctcaattacgatgcaagttgatcagttagcggcggacagtcaataccaggcgattgttaaattggttgaagcttcggccaatcaacccgcgaaattcgtgcggatggccgatcgctacgccgtgccatttacattagtcgcttacattattgcggggattgcttggtgggtttctaaagacccggtgcgttttgctgaagtactcgttgtagcgtcaccgtgtcccttaattttagcggcaccgattgctttgatttcaggcatgagtcgggcgagccggaacgggattatcattaaaaacggtaccacgattgaaaaattagccggcgctaaagcaattgccttcgataaaacggggaccattacaaacggccaattaacactcgatcaagtcgtgccccaaaatggctttactgaagcttcgttattgcaattagcggctagtgctgaacaagaatccagccacattctagcgcggtcattagtagccgctagtgacgcagctactagattgccgttaactgatttacaagaggtgaccggggcaggggtgattgcaacctttgcagcgactcaacaaacggttaaagtgggtaaacttaattttgtcgcaccagagcaaccaacagcaacactaaagcaaaccgctgttcacgtagccgttaacgaccaatatgcgggttatatcacgtttatcgatcacttgcgggcagaagcacccaagacgattcaagaattacaaaccttgggcttccagcaattgaccatgctaacgggggatcaacaagcaactgcggatcaaattgcccaacaagttggcattacggatgttcacgctggttgtctaccaattgataaaattcatttgcttgagcagactgcaccagataaccgtccgattgtgatggttggcgacggggttaacgatgcgccatcattggcaactgctgatgtcgggattgcaatgggcgcacacggtgcaaccgctgcgagtgaatcagccgatgtcgtcatattaaaagatgatttaaaccgagttagtcgcgccgttcagattgctcgggatacaatgagtattgcccggcaatcggtcttaattgggattgccatctgtgtgatcttgatgttgatcgccagtactggggttgtgcccgccttaatcggggcgatgttccaagaagtcgtcgatacagtttcaattttatattcactgaaggctcgtaaagaccggccattactcaaataataggcaaataaaaaccgtcacctgattttagatgacggtttttttgatgttatgatttagcagcttgttgatcaaatgccatatcttttggtaaataaatcgtcggtaacatggcgaataacacgcacgcgacaatcccggtcagaatgaaggtcacgataaaactaccaccattaatcacgagcgaataataccacggattcattcctttgggtgcataagagccccagtaaaccacaccggcaataaaatgacagaagtatttagcaaaattggcaattaaagccgccgaccacaataaagttaacgttttaacctttcgatgttgtcgaatactggtttgaacttggtgctggcataagccagctaagccaaccacgataaaggcgaccgtaaattcaaaaagcccttgccagacatttaaaacactaccactactgagaccacgcaaaattaaatctaacgtgccccaaatgaatgcagcaatcatgcctggtacggcgccacgccgaagactataaatgacgatgggaataatcccgaaggaaacttcaatcgcagatggcccgactgtgtgcggaatatattccaaagcaaccgcaaaggccgctagaattgctccttcaatttgaatcaataaacgctgatgacgcatagaaaaaccccttttctgttcaaccaacacaaaaaaggagttgttatattcaactccatcacaattcctacgcttgtcttaacaaacaggttcgaagggtctgatcattatcactctcagccaatggctcccctttgtgatggttaatatttaattttaagaacgttttcagtatacctgaatcagcactcatgtcaagtaatcgatttcaatcattccattttatccatcgctgcgcgttgttcatcgtcgacaacgtgcgtgtataaatgggtggcttgggtcgttgtttggcctaattgggtcgcgacaattgtctcactgtgggtagcggccattaaatcggttgctaacgtatggcggaatttatgcggcgttaaacggaccccgaaggcttcagaatatttcgcgactaatttctcaatggcgtaattactcatccgtttcgcttgaccacggtatttcgctacgaataacgcgtgttcattggcggttgttgcataacgtgtctggcggatttgaacgtattcttctaggtagggttggccccatggtgcaattgggaccgtatcctgttggccgcctttacgaataacggtcacggtcaattgttctaatttcaagtccgctaaattggcttgtgctaattctgataaccgaatgcccgtggttagcgctaagacgcagatcgccacgtcccgttcacaattttgttgataggaggccaactgccgattcgatagttgtttcggataagtcatctgcataaaatcaataaatgcgtgtttcttatcaccagttaataatttttgaccgatgtgccgtgaacgggtcgccatggtttcagatgatttgagtagtttaaccttcttcatcacgttacgatagaaataaggctcaccatcggcttgttctgcttcaatcgttaaaaagtaccagagtgcatttaaagcgttaattgagcggttaacggcctgaaaagagagcttgtggtgattcgttttgcgtttgttcatcaaatagatcttatagagttcaatatcttctaatttcatcttctcaagcgcggtgagggggattaacctcggttcagcaaccattacgatctgttcgtcaatcagccaagagaagaagcgtacgtattcttgcaagtattggtaaagcgtcgccgaggaataggcgttagcctgtcgattgatataaaatttacgaacgtaatcgggcaagctagttaaacgttgttcacataattctagatagcgtaattgatccatgattaaaactccttagaaaccgaataacttaattttagcaaagaaaaggtgaaaataccacaagtgttgttaaaaccataattttaacaacacttgtttaatcttaaaatagcacccccaactttatcaggttgaaattggcggtttgcaatcgactgctgattatagataaataccggtatatcaaccttttgccacgtaatctaggtgttttacccgataaatagctgtaatttagctaaaatcaacttaatgagcatctaaatgagctgaatatcggtttaaaatcactaattcacggtattttcaggctaatttaatggtttttaaagttcatgctaacgaatccaactcaacggttgatcaactggctgactatggtagtcgagtctcaaggctgaatcacgacaagcagtcatgcaacaattcagaattgaactgaaaacgcaattgggttaacgaattatcggtcactaaattgattaagtcaatctagtggtttaaagtaagtgcattaaacagactaaatcgattaaagaagcctctcttgatgattaatatacaacttcgtataatatatattatgtaaactagaatagattaatctttttaaggcttgaaatcggtgctcacctacctacttttttttgtctttaatctacaaaaaagttattctgaatgtcggtcatttcagaataactttttgataatccgtttaaacaaagccaccaaaggcatcatctagattgattgggttgtgcttggtgacaatcgtttctttattgacgaaggtttcaatcccgaaacggcctaattcacggccataacctgaatttttaacgcccccaaacggtaattctggtaaagtacccccgaagctattaacaaataccgaaccagtctctaattgactggcgacctcagtggcgtgttcaggcgaacccccaaacacaacaccacttaaaccgtaatgtgaatcattagctaagcgaattgcggcggcttcgtctggtactcgatagatctgaccaaccggaccaaagaactcttgatagaatgctgggttttctttggtaatattcgtcaagatgactggttcaaacaatgcggccggtttgttttgtgccagactaccaaaagccaaagttgcaccattttcgactgcagcgcgtacttgctgtgctaagttttgttttgcttttgaagaacttaagggcgctaacgtcgtggtgcttaacattggatcgcctagtttaacggctgaaaaagcttcttttaacatcgctaacatttgctcataattcttttcggtaacgataaaccgtttagaagaagtacagacttggccggcgttaaatagacgagccccactaataatttttttaatctctgataaattggcatcatctaagacgataaagggatcactcccccctagttctagggaactttgtttcatatttttgccagcttcagcagcgactagttggcccgcgcgttcagaacctgttaaagcgacgccttggacccgcttatccgcaataatctggttaacttgatcataagtaatgtacaagttagcgaaagccccctcaggcacccccgccgcgatcacaatcttttcaaaggcttcagcggccatgggacagttactggcgtgttttaaaagcattggattacctaccatgaagttaggggcaaaaacacgcatgatttgatagtatggaaaattccatggttccaccatcatcaagattccggttggtctagaaataacttgcgctgtgccaattgaagatttaatgtgttcgggtttcaaaaaatcagccgcgtgttcagcataataccgggcaatcgagatacaaagtgccacttcaccctgggcttcaacgaaccgtttgcccatttccactgttaaaattttagctagtgcatcactttgagcggccattaaatcagccactttatttaacactggaccccggctagcaaccggatcattccgccattgcttgtacagtacatcacctttaacaagcgcttgttcgacataggcagcgtcatgattcggataagttttaaggacctcatcggttagtggattaattgtttgataactcatattgatcgacctttcttaaataaagctaatcttgttttgccaacagagggctctctttaaaatggctaattgattgtctgttaggtagcgctttatttgtgtatacctgaaatattaacaccatcttgtcaattagaccagtatttaatcttatggttgctatgccgataaatgccaatatattagcgaattatccgttgaataatcatatttattagatagaccactttaatatttacataaaaaaagataatcggcgaagacgcacgattatctttgtgagattatttagtttgatacataatgccaaatgctttcaggccaacgtggctcatgataactgggctcgttaatgcaacggtgtatggcacatcgggttgaccctgttgtaaaatactttgaatcttaaccaggtcatcctcctcaacgccgacatgtgagatgccaacgtctactaacgtttgttgactaatggtcgcttgcatttcgtttaacaccttgctaaatgctttagaaccccgacctttagcgacaatttgtaactgtgaatcggttaatcgaacgacgacttttaatttaatcagtttcgtgagtaatccggcgacccgactaattcgaccgccacgttgcatggcgtctaatgaatctaggaagacgtaagtttcagttttagaacgaatttcatctaaatgggctaaaattgcttctaaatcaaggccagcttcagcatcttgtacagcggcaatcacttgataagccaaacctcgatccatgaccttactatcgaggaccaccacatcactgtttgattgttgggcggcggtatgcgccccttcaaccgtgccacttagtaggccagtacaatgaatggatagaatctgactaccatcagcgcctaattggtcgtatagctcaactagactgccaacggttggctgactggtcgttggaaattcagtcgttgctgcggttaatttggctagaaaatcttcacgggtgatggttttaccatcgacgtaagtttcacccgcgtattgaaccgttaagggcgcaatatgaattggataagcgtcacgttctgcacgtgtgagttgaatcgatgaatcggttacgattttaatagtcatgataattctccttttttaaagtgattctcttaaatgtttaaataaattgaaaagaacattaaggtcgtccctaacattacaaagaaatgccaaatgagatgtagtcccggaatccgtgggaagctgtaaatgacagcccctaacgtgaagaccacgcccccactgactaataaccagaacccggtcgggcttaaatttgtgtagagggccttgctggctaacatacataaccaccccataataacatagatggttgtttcaattctttgatggcgaccatggctaaagatatgggtcaaaatgccaccaatcgctaataaccagatggcaatcaagaggctgaggcccatcgtgtgcccgacaaagattaaacaatagggtgtgtacgtaccggcaatcagcaaaaagatatttgaatgatcaaatatttgaaaaacccgtttcgctcgggtaaacgctaaacagtggaacagcgttgacgctaaataaagtaaaagaagcgttgcgctataaatgatgagactgactaaggcgactggggttaaatcccgctgaacgcctttgattaataataagatgaccaatgttaaactgccaaagaatccgataccgtgagtaatcgcgttccaaatctcataaacaattttttgatgccgattaggcgctgcaatttgcataataaacgctccttttttctatttgccagtattataaactaaaaatagaatggaagtcaactaaaaatagaattcaattctacataagtgacaaaccatttcatttgtggcataataaccttattgaaactcagtcgatcggagttatttaaatgcaatcagaaaaatttgaaacgtggcttaatgagttccaacaattccggttacccttatgggcggacttcccagatttagaattatatatggaccaagtgattagtgaggtcaaccggtcactggatcccctactccacgttaaaatcacaaaaacgatgattaatagttacgttaagatgggcatcatcgaacgccccgagaaaaaacgttacaatcgtaatcacttggcggaattaattgtcgtcagcgtgattaagttttccttcccactcgatgtcgttaaacaagggattcaacaatcattagaacaagatactgcaggcattgcctacaaccacttcgttgaattattcaatgccgaaattgctaacgtcaatgcaccagatgccgttaatgcttttaactttacggaagcgcccctaacgattattcaaaaaatggctgtcaaatccgttatttataaaattattgggactaaattaatcgattttaaagaagaaacgcccattcctcccgcggaataaaaaatagaccttcaaggccgcggctttgagggtctattgcgtattatgctttagtgaaatctttaatccaggataaggcaatcgccttttcaccgagatgggtcccgataacgggaccaaaatagccaatatcaattggcatgtcggggtatttaacccgtaatttagtttgccaggcaacggccgcggcttcatcattggcgtgaatcagtagcgctcgcatcggataatccgctttttcaatgttctcagcaaaaatttgttcagctcgcgcataggccttctttaaagaacggaccttttcaaaagcgacgattttattagaaaccggatcgaatgttaacaagggtttaatctttaaaacactgccaatgaaggctgaagcgtttgataaacggcccccacgaactagattctgtagatcattaacaatgaaacattcatcaattgtacttctcagatcatctaaccgcgcaataatttgttcaaccgttgcgtcgggttctttcgccattcgagctgcttccattgctaaataacccattaacatcactgtaatcccagaatcataaggaatgacttgaacattatcgatggtgcttgctgcattttttaacgtggtgacgaaaccagaaatggtacttgctaaatgaatactaatcacggcatcgtaattttgattgcctaaatcttcatataacttcaacatttcacctaatggtggttgtgacgtactagggaaagtttcagatgtttttaacttttgatagaactcttcagttgtaatatcgacgccttcattatagacctggccatctaggatcaccgggattggcacgacgtaaagatgattatctttcacttgctgttctgtgagataagcagtactatcagtgactacagcaattttcatggagacacctacttttttattattcgctaataactatatcataaataatcggctaattccgcatttatctgtatttccttaaaaaacgtatagggcctctcacttttcaaaacggataaagctttggtagtaccgatttaacagtatttttagcaattgttgttcttctgcactccaattatcttggacttgttgttccaattcagtttgccattgccgtaaacgagtcgcaattcgttgggcatgttcggttaaggtgtaaacacgctgacgaggttcagtgcctttagtcttcactaataagccctcttgcgccatgccatttaactgacgacttaaagttgacgcgtctaatttcgtactatcaattaacgctgcatgcgagagtaaggcttgctctggggcaactaacatgaggatattgacttgtgctaatttaatattcaaccgttgggcccattgcttcttttgctcttgatacaataaattaagttggttaaacgtcgttaaagttgaattcattcgcttttcgctcctttattgtagaatgcaataaaataattgtattatacaataaattgactgataagtaaattcctttgagcttgatggttaaaaccgttacaataagtaagacaatctatatagagaaagtgtgatttaaatggcctttgatggtttaatgacccacgccgttgtcgctgagttaaatacgacgttagccgacggtaaaataactaaaatccaacaaccttaccccaatgaagtcatcttgacgcttcgggctaatcgaaagacctatcccctactcctttcggcgcatccttcctacgcccgggttcaaattactcgcgtgccttacgcgaatccggcgacgccccctaattttgcgatgtcgttacgaaaatacctggatggttcaattctagaaaaaattgaacaagttgaaagtgatcggattttgcgtttcacgtttaaatcgcggaatgaattaggtgatttacaacaactctgtctaatcgtcgaattaatgggccggcacagtaacgtgattttggttaaccaagaaaccaataagattcttgatttgattcggcacgttagcttatcgcagaaccgttaccgcttcttaatgcctggtgcggactacgttaatccgcccgctgcttccggcgtcaacggttttacggccgacttaaccgacctagactggctgagttattataacctacctgaaactgagcaaccgcattggttacaaacgcaattccaaggaatgggccgtgaaagtgcaatcgaattacaacatcggttactggatcatgatcattatttgacgattgtccaggatttcttcaagcaatacaaccaagccacaccgacgttaacgattggccctaaaaaatcttggtttaccgtggcagcttatcaaacattagttggtgaacaaacgcaattgccaacgcttagtgaattgttagaccaatactatttgcataaagcgcaacgcgatcgggtccaacaacaaggtggcgccttgattcattttatccgtaatgaaattcaaaaggatgaaaagaaacttaaaaaactgcaacaaaccctcaagacggctgatagtgctgatgattaccggattaaaggtgaaattctaaccacttatttgcgccaagtcgaacgcggtatgaccgaaattacactcgataattattatgcggataaccaaccgattaaaattacgttatcgaatcaattgaccccttctaaaaatgctcaaaaatacttttctaagtaccaaaagctccgcaattcagtcgcttatgtcaacgaccaaatggctaaaacggaagcggaactgcaatatttcaacacgattatggcccaaattgaaattgctgcgcccaaagatttagtcgatatcaaagaagagctgcaagctgagggctatttaaaaactaagaagtccggcgctaagaaacaaaaacgttacaagattagtgaacccgaaactttctacgccagcgatggcactcggatttttgttggtaaaaataactatcaaaacgatcagttaaccctcaaaaaagccaagaaaactgatatttggttgcatgttaagaacatccccggctcacacgtgattattgacgctagtaacccgtctgagacgactttaaaagaagctagtaaactagccgcctatttctctaaagctcggctatcggcctctgtgcccgttgattacattcaagtcaaacggattcgcaaaccgaatggggctaaacccggttttgtaatttatgaaggccaacaaaccctttatagcacaccggatgaagcacttgtccaaaaattacgacaaaagccaagccaagcctagtaattatttgaaagccttaaaaaagcatgttataatttaagcatagaaaaagagaccatgcgctaacatgacctctctgctacagtccgttaaagacggtggcatcgttaaatcattaagaaataaccgttaacctgccaaagttaagacggttattttttttgattaaatttcagaatttgaatcactaaggttgcaaaagcaatcgcaactagcagtgcgtcagaaactgacatgtggtcccctttccagggtaaaacatatgtttaatcataggcatcaccccatttctgaagttagccaccgtcattagcttactgtatatttattgtaacataccttaatttagcctatttaaaaacaaatgatatatttaaaccttttgctttaactcatgtcataacttatcaatttccgttcaaatttaaagtgctgcctatccccaaaatcaaggatagacagcatttttaacgtgatattcaattaaatttaatgttgatctgaccacgcttgtgggtcttgactccatgtttgtagtgattgcagttgttcagccgttaaatcgtcggcttcttgggcaatcgctaataaggcttctaaattcgacagtgtcgtcaatgataattgcgcctctgcaaaattctttttgccagcggctaactgatatgagaaaatcccgaaaacacctaaaacatcggcgccttctttttgcgcggcgtgtgcggcttggagcacgctaccaccggttgaaattaaatcatcaatgagtaccattttttgaccggctttaaacggcccttcaatttgacgaccctgaccgtgatccttgggtttagaccggatatagaccaaaggtaagttcaataattcagccacccaagcggcgtgtggaatccccgccgtcgcagtccccgcaatcacttcaacgtctggatattgatcatgaatcgccttggctaactgttcagcgattagtcggcggactttaggatagccgatagttaaccgattatcacaataaatcgggctctttagcccactggcccacgtaaaagggtcatttggacttagactcacggcttgaatatcaattaaggcttgtgcgacttctttagcgatttctgtcattatttttgctcccattctgctttgattgtttgataagcctgatacggattagtggcttgggtaattggccgaccgatcacaatggcactactaccagcttgcgcagctgccaatggtgttgctgaccgtttttgatcgttagtttggctagtggctggccgaatccctggtgtgacacagtcaaagtcgattccagtttgcgcgtggattaacggtacttcttgaacagaacaaacgacgccatcacaaccagcctgttgcgcgatttgtgcgtaattcgtgactgattcgggtaaagtcgcttgaacgagttgttcagtttgcatttggctttgactggttgaggtcaattgcgtaatggctagcaatttagcaggcttgacctgtgcttttgtggcccccgcttttaaaccagcaaccccggcttgcaacatttcactacccccagcagcgtgaatcgttgtgtaatcgacgcctaattggccgatcactgttaaggcactatgaacggtattcggaatatcatgcagttttaaatctaagaaaatccgatgcccccgcgctttgagcgcccgaatgacatcaggaccagttttgtagaataattccatgccaacctttacgaacaaatgttcgccttctggaaattggtctaaaaaggcttcagctgtgggcaaatctggaaaatctaacgcaataatcagtggttttgtcatctctatttgacctcctgagtgacggcaaagcggcttaaatccgcgaaaccgtacttcgtcatttctattggtagttgttcaatcattttaggacacgcgaacggatcggtaaagttagccgtcccaactccaattgcattggcgccggcggctaatagttctaacgcatccgtcgcattttgaacgccacccattccgataatcggtaatgccgagattgaccgaacttgccggataatccggacagcgactggtttaatcgccggaccggataagccaccagtctgattcgccagaattggttcgccagttcgaatgtcaatccgcatcccaaccaaagtgttgatgagtgaaaagcctgccccccccagcttgttcaacggcttgggcaatcggccgaatatcggtgacgttcggtgataacttgacatagaccggtacttggctaacggcgacacaggccgctgttagttgtgcagctgattgcggatctgtcccaaattctaaaccaccgtgtgccacgtttggacacgagatgttgagttcgattgcgtggacattgggcgcggtactaattgtttggcacacactgacgtaatcatttaatgtattgcctgctacgttcgcaatgattggtagttcaggataatgttgggctaaccacggtaatttctctgccataatggcttcaatccccggattttgtaaaccaatcgcattcagcatcccactcggcgtttccgcaacgcggggtgtcgcgttaccgagacgcggttctttagtcgccgctttaataatcacggcacccaattgatttaaatcataatgttgactatattcttgaccaaatccgaaacacccggaagcgggcataatcggattttttaattgcagaccgggtaaattaacggctaaatcaaccatttaaatcaacacctcatttgttttgaagacgggaccgtcatcacatatttttaattgaacttccgggttacttctaagtttagtgacacaagcgtaacaagcaccaatcccacaggccatccgttcttctaacgagatataagcgttgggatgattggcgaaacgattatcaaccgccatcaacaaaccttttggcccgcaagcatagattgcgtcataagtcgtcaaagcatcggcaaactgcgcgtctagtaataagccaatgtggccttgatagccgtaagatccatcgttagtcgcataggcggtcggtcctaatgcttcgaattcagattggtaaaaaatcgcagattgggttgcaaacccgaacagatgttggacttgaacgcctttagcgactaattgccgcgataattcatacaagggtggaatcccggttcccccaccgatgattagggccttttgaccgggctgtaattgtgcaatcggatagccactgcctaatgggcctaagaccgatagttcagtcccaactggtgcctgacttaaaatcgtggtcccttcgccgacgacccgatagagtaacgtcatcgtcttttgctgcgcatccactttagcgacaccaaatggtcgacgcaataataaggcatcactggggattttgatatcgacaaactggcctggcgtgaccggttgttcagccaggcttcccgctaaacataattcatagatattcggtgcaatttgggtttggtgttgaatggttaaagtagattctactgacaataaacgtcgactcctctaaattttatgtaataaaagccagcaatcacttgctgactcttggaaagactaaagtggttgggtcattaacgattgtgattctaagacggttagaatcgccgctgtcgtatctaacgaggttaataacggaatgccgtgttcaatcgctgtttgacgaatgacgatgctgtctttagagacttgcggtgcttcgtttaaacccgtggtattaatcacgagttgcacttggccagccttaatccggtctaataattcgccggacgtggccgtaatcttagacacttggcgtactggaatgccggctgctttaaactcttgcgtcgtccccggtgtcgctaaaatttgataacccacttctctaaagcgtttcgctaattcaagggcttgggctttatcttggttagtgaccgtcatcaagacgttcccgtgatttggtaaatgcatgccactggcttcaaacgctttatagagcgccttttgcatcgtgacatcggtgcccatgacttcaccagttgatttcatttcaggcccgagcaaactatcaacgcgggttaatttcgagaatgagaaaacgggtgctttgacgtgaatcagtgggccggctggtaataacccggtcggactctttaattcggctaaggtactgcctaagattaattgcgtggctaattgggccatcggaatcttagtgaccttacttaagaatgggacggttcgactggcccgtggattgacttcaatcacgtagacttcgtcgttttgaatgatgaattgaatgttgagcaagccacgacaatcgagggctaaacagagcttcgttgcgtattcaacgattgtttgcttttgttgatcggttaagttttgtggggggtaaaccgccattgaatcaccggaatggacgccggcgcgttcgatatgttccataatccctgggattaagacttcatgaccgtcacaaatcgcatcgacttcacattctttacccattaggtagcggtcaattaaaacgggatgatcatcggaaactttaacggcttcttgcatatagtgttttaaatcttcagtggtatgcacaatttccattgcacgaccgccgaggacaaagctaggccgaattaagacgggataaccaattcgttcggcgatttcgatggcatctggtgtattggtcgcagtggcaccaactggttgtggaatctttaattcggtgattaattgatcgaacaaatcgcgatcttcggcgcggtttaaactctcaacactcgttcctaaaatcttaacgccattttcggataacggttcagccagattaatcgcggtttgaccaccgaattgaacaatcacaccttctggtttttcaaggtcaatcacgtttaagacatcttctaacgttaatggttcaaagtacaacttatccgaaattgaaaagtcggttgaaaccgtctcgggattactattcataataatcgcttcgtaacccgctttttgaatggcttgaacacagtggacggtggcgtaatcgaattcgaccccttgcccaatccgaatcggaccagaaccaatcactaagattgagggcttcttagtcacgatactctcgttttcttgttcgtaggtcgcgtaataatacggtgtttgtgattcaaattcggccgcacaagtgtccaccatcttgtagactggtagaatcccgctttcctgccgcaatttgcgaacttgagcggtggtgatttgccaaagactcgcgatttcgctatcggcaaacccgtttttcttggcgatttcgagtaattcaacatcacctttatcggtacgcaattgttcttctaattccacgatgtgactcaatttatctaagaagaataaatcaattttcgttaattcagctagttcttgaattgaatagccgcgacggagcgcttcagccaggtagaaaaggcgatcgtcttgcggatgaataatccgttgcactaaatcgttatcgctgacggcggttaaggcgggttcaatcagatgttcagtatcaatttcgagagaccggaccgcttttaagagcgcttcttcgatattccggccaattgccatcacttcgccggtcgccttcatttgagtgcctaaacgccgatcacccttgttaaatttatcaaaaggccagcggggaattttagcgaccacgtaatcgagcatcggttcgaattgcgcgtaagtggtcccggtaatcggattatgaatctcatctaaagttaaaccaatcgcaattttagcggccatcttggcaattggataaccggtcgctttagaagctaaggccgatgaacgactaacccgtggattaacttcgataatgtaataccgttcgctatgtggatcgagtgcgagttgaacgttacaacccccttcgatttttaaagcgcggataatttttaaagaagcatctcgcaacatttggacttcacggtcacttaaggtctgaacgggcgctagaacaattgaatcacccgtatgaataccaacgggatcgaaattttccatgttacaaacaacaagtgcgttatcgttgcgatcgcgcatcacttcaaattcgatttctttatagccagcgatactttgttcgactaatacttggccgactggtgataagctcaggccgttagctacgatagtttcgagttgggttggattctctgcaatcccgccacccgttccaccaagcgtaaaggccgggcgaataatcacgggataccctgtttcgttgacgaaagtttgtgcttcgtctaatgaatgggcaatcgctgattcgggaatcggttcgtttaattggttcattaagtttttgaataattcacgatcttcggcttggtcaatcgcgcttaacttggtccctaataattcgatgtcgagttcagctagtaatcctgaattagcgagttcgagggccatgttcaaaccggtttgacctcccaaggttggtaaaatcgcatctggcaattctttacgcaagatttgggtaacaaaatccaaagtgatgggttcgatataaaccgtgtcagcaatcgcttgatcggtcataatcgtcgcggggttggagttaattaaaacaacttgatacccttcttcttttaacgctaagcaggcttgggtgcctgaataatcaaattcagcggcttggccaatcacaatcggaccagagccaatcactaatattttttgaatgtcggttctttttggcatctttaaaacccctttttttcttatttttcgcgtcgattaaaatcgtcaatcatatccatgaattcgtcgaacaaatgaacagcatcgtggggaccaggggcagcgtctggatggaactgcactgaaaaggctgggaattgacggtggcgcaacccttcaaccgtttggtcattgatttcaatatgggtcaccaataaccgatcgttatcaattgaatccgcagcgactgcatagccgtgattttgagatgtaaaatcaatccggttggttgcgacttcgcgaacgggatggttaaaaccgcgatggccgaacttcatcttgtaagtttgggcgccgttagcgagtgcgaataactggtggcctaaacaaatcccaaaaatcgggaccttgccttgaatcccttgaatcatcgtgatggcttcaggcacatcttctggatccccagggccgttagttagcatgacgccgtctggatctaagctcaggatatcttcggccgttgcgttgtagggtaagaccgttaaattacaattacgttttgataattcgcgtaaaatactgtgcttcaagccgaaatcaacgacgacaatgttgcgcccggttgcgggactcggataaggtttagcggttgaaacttgttgaacttggtttttaggtaagaccaaagctttcagttggtcaaaagcgtggtcgtcagccgcatcaacgatactggctttcattgtgcctttattgcgtaaacgccgtgttaaagcgcgggtatcaacacccgaaatcccgggaatcccctttcgtttcaagaaatcatctaagctcatgttcatgcgccaattattggctagccgagggacttcgtgaacgaccacccctttacaagttggcgtaattgattcgaaatcatcacgattgaccccgtaattaccaatcaacgggtatgtaaaagtgataatttgaccattataagattgatcggtaattgtttcttggtaaccactcatcccggtattaaacacaatttcgccggttgtaatagtgggtgcgccaaagccaaatccgctaaagacactacaatcttctaatatcagataacgtttcatttattattcgctcctttgataagctgtttgaccggcaaccaaggttaagacggtcgttcctaaaacagtggcaccgatgaaaggtgtgttacgccctttcgattgaaaatcagtggcttgaatggtggtcggcgtttctaaatcaaagatggcgatatcggctaaatcaccgacgttgagttgccccgcctgctttaagttgaacaattgagccggattgaccagcaaccagtcgattaattggctcaaactaaagggtccgttgaccacaaggtttgtgtagagcaagctaaaggcggtttcgctaccgacaatcccaaagggtgctttttgaatcgactgcgctttttcagccgcagtatggggagcgtggtcggtcgcgacgatatcgatcgtaccatctaacaggccggcccataaactttgccgatccgctaaactacgcagtggcggattcatcttgaacatggcgttatcggtcgtaatcatcgaatcatccagtaataaatggtgtggcgagacttcgcaagtcacgttgaccccatcggctttagcgcggcggaccaatgcgaccgtttctttcgtcgaaatatgacagatatggtagtgaacaccggttgcgcgggcgagttcgatatcccgtgcgacttgagcggattcactgacactcggaatcccaggtaagttcaaccgtttagcggctgcgccatcgtgtaaaaccccgccgttgactagagacatgtcttcaacgtgggcgacgattggtaaatcaagggcttgcgcttgttgcatggcgagatacatggtttgtgcggtttggacaccgtgaccgtcattcgtgaaaccgacggcgccagcggctttaaacgcgggcatctcaactaattcttcttcggttaaaccgttagtgatgggtgcgaattgatacgtatgactgaccgtttctgtcgcgttacggtcaactaatgttttaaaatccgcaatgttatcgggaaccgggtttaaatttggcatcgcaatcacgctggtaaaaccaccgtgaactgcggcgtgactgccagtgactaacgtttccttatccgtgaaacccggatctctgaaatgcacgtggccatcaattaagcctgggctaacgaaatgaccttgtgcgtcaaaaatggtcgccggttcataatcagcagtgctaatggttgattcgattgctgtaattagcccctcttcgttaagtgcaatatcttgtttaaccagttttgagtctactaatacttgaccgtttttaattaatcgatacattttctgacccccgaattaagcctttttgttgtaataattgttcgataattgccatccgcatgtacatgccgttatgcatttgcttaaaaattcttgattgtggtgcttctactaattgatccgcaatttcaacgtcgcggttaactggtgctgggtgtaaccaaatggcgtgcggtgctaatctagcagcccgctcattcgttaacccgtaagcatcgtggaattgttggtcggtcatcggtgcagctgattggaaccgttcgtgttgaattctgagtaacatgaccacgtcgacttcggccaagatgtcatctagtgcaacatgttgcccatattgttcaaactcagcggtaaaccattctgcgggtcccgcgaaatagagttgtgcgcctaagcggtgtaaaagttgcatgttcgaacgcgcaacccgcgaatgcgttaagtcaccgcaaatcacaattttgagcccttcaaagtggccaaattcctcataaatcgtcatgacatccagtagacattgtgagggatgttggccactgccatcaccggcattggccaaggccatgtggaagttaggatctgctaataatggtttgtaataagcatcttgcgaatggcgaatcgtgacgagatcgacgccgatggcttgaactgtcttcagtgtatcacttagcgtctcacctttactaacagaactggtttcaacttcgaatggtaggactgataagcctaactgccgttcagccatgtcaaagctggtcttagtgcgcgtactgttttcaaagaatagattcattgcatagactggtcgggtcagttggcacgttgccccggctttaaacgcttcagcccgttcaattaacgttaaaacgtcttgattggttaattgctcgactgatactaaagctgcttggttaggcattttgttgcgcctccaattcgatttcactcttagctttttgcggtaagattaagtttaaggcaatgcctaaaacagtcgcaatcgctaagccagagaattggtattggccgagttggagataggcgttgccaatcccgatgactaagattgatgacccaatcattaaattccgtttcttatcaaaatcaacttggttatcgattaaaacccgtaaaccacttgatgcaatcactccgaaaagtaagaagctaatcccaccgataactggtgaggggatactttggattaaggcgctcaatttaccgatgaaaccgaagatgatggcgaagaaggctgccccacccagtacccagacactgtgcactttcgtgatggctaagacgccgatattttcaccgtaacttgtcacgggcggacctccgaaaaaagcggcaataatcgaggctgtcccatcaccggctaatgtccggtgtaggcctggatctttaaagaagttccgtttggttaatttgttgaggaccatgatatggcccatgtgttctgtcatggtaacaaaggcgatgggtgccatgctgagaatcgccccccagtacaagcctggtttataagtgacaaatggaatttggaaatccggtagtttgaaccaagccgcttccattactggttggaaatcaacaatcccgaacaaaaccgcgacaacgtagccgcaaacgattccgagaaggattggaattaggctcatgaacccttttaaatacatattgaaggcaatcgtaatcagtaaggtgatgagtgcgaccgcgaagaattttaaatcataatcaccagcgctattaatggtggcttgtttagccgcggtccccgctaaagataagccgatgaccatcacaatgggtccaaccacaatcggcggtaaggctttatcaatccattttgaaccaatcaatccgacgatgactgaaacaatcaggtaaactgcaccaacggccattgtcccttgcgcaattccgggataaccggttgttttcattaaggccaacatcggtacgatgaatgaaaagctggaacccatgtaagctggaattttacctttggtaatcatgatgtacattaacgtgccgacccctgaactgaataacgcaattccgggatttaacccaactaagattggaactaggacggttgagccaaacattgcaaacatatgctggatggataaaccaatccatttcccggtacttggtcgttcgtcgacgtctaatacggcgtctgggtttctaaaagctgattttgtcatattgtgcttcctccaactattaatccgtaaaaaaagacacgctactagtttgagagcgtgtcttttgcctgccgaaaggacagcgtgccgcgcaccctatcctttcgaacaaacccttttgctctctctggagtcaattaaacggttaatgattatttagttaatttttcaattgtaatgccatcatgttgatcaatttcttccatagcaactttaatttgttccgttaaagccgttggaatatttttgccgacaaaatctggccgaattggtaattcgcgatgaccgcgatcaaccaaaactgctaacgagatttttttagggcgaccaagatccatcaacgcatcgagcgctgcgcgaattgtccgacccgtatacaaaacatcgtcaattaagatgacgtgtttgtttgtgatatcgactggaatatcactgccattaatttgcggttcgttttgcgaattcaaatcatgttggtcatcacgatacaaggtaatgtccaaagtcccaacgggcaatgtaattccttctagttgttccaagcgtttagcaatgcgatgagcgataaagacgccgcgggttttaatgcccactagcacaaggtctgaaatccccttgttttgttcaataatttcgtacgtgatgcgggtaaaaacccgtttcatagtcgtactgtcgacaacttctttcgtcataatcatcccgctccttccaaacaaaaaacctcctgaccagttggccaggaggttacagttgtggtttgctagacgcattgcgccgtcaccacttattcaccgtaccttctgggcctcacgggaccaattaaaggtttctatttatgttgctattagcatatcgaatcgcttgctaaatgtcaattgttttcgcgtaattgcgttaatgttctttcgaatatagcgggtaacggtgcttcaaattgtaattgttcacccgttattgggtgtttgaagcctaaaacagcagcgtgtagaaactggcctttacctggcaaagtcttgcgtggtccgtaaaccggatcacccgcaactggccggttgatatacgctagatggacacgaatttgatgggtccgcccggtttctagtcgacatttaatcaacgtaaaatcggtaaagcgttcgatgaccttaaaatgagtgactgctgggcgaccatcaggaataatcgcttgtttcatccgatcaacttttgaacggccgattggcgcatcaatcgtgccttcatcttcttcgaaattaccgtggactaacgccacgtattcgcgcagattcgatttcgcttttaattgagccgataacgattcgtgggcttcattggttttagcgaccatcaataaaccagaagtgtctttatcaattcggtggacaatccccggccggaacacgccgttaatttcggataacggtgtgtgggctaataacgcattgactaacgtgccattgggatgccccgctgacggatggacgaccatcccttgtggtttattgacgactaatacttgatcatcttcatagacgatatctaacggaatatcttcgggcaccaaatcaagttcgaccggatctggaatttcaatcgtcacaatgtcgttttcggcgactttgtatttagctttacaaggcttttgattgacttgcaccaagtcttttttgaaccattgttgaatttgtgaccgcgaataatctgctaataattgcggcaataccttatcaattcggcccgtttcagttgtaattgttacttgttttttttcagtcatgagtcactttctctttcaccataattgcgatcaacacgcagattacgccgaaagtcaacgccatatctgcaatgttaaagattggaaaattaataaaatctagttggaacatatcaacaacgtactttaaatgtaaccgatcaataaaattcccaagcgcaccagctagcattaaagctaagcccgtgcgatataatctttcagaccgctcagaggtgtaaaataagtacccaatcacaccaactgccacgatggtgaccagatagaagaaccattgttgtccgcgtagaatactccaagcagcaccatcgttttgaacatacgttaacccaaaaacattgggcacgattgttttgaaagcaccaaaactaagatggccaaccacccagctctttagtagttgatcgctaccaattactaaaaaaactaaaattaaatataacaccacggtttccccctattcgtactgattaacattgtccttaaaaacggcactgatgtcaatcaatttcgaacattagaataaccctgaaatttgaccgtccgcagtgacatccatgtttaacgcagccggttttttcggtaaacctggcatggtcaaaacggcaccggtcattgcgacgataaaaccagcccctagtttcggaattaattcacggacatgcacggtgaaatcggttggtgcgcctaaggctttcggattatccgataatgaatattgcgttttagcgatgcagaccggtaactggccccaaccgttcttttcaatttgtttcaattgattgatggctttgccttcaaagaccacttcacggccaccgtacatttcggtcacaatcgtgttgagtttggttttaatatccgcttgagcatcatataagggttggaagtctttcggttgatctaaggcagcgaggacttcatgcgccaacgccaatccaccttgaccaccgttagcccagacactggtttcaacggccttaacgcctttttgttcgcaaagttcttgtaacaagttaatttcagcttcagtatcactggtaaattcgttgaccgcaacgacgaccggcacaccataacgttgcatattggtgatgtgcttcgctaaattgctaaagcccgtttctaacgcgcctaaattttcagtggttaaatcagtcaaagcgactccgccgttatatttcaaggcccgaattgtggcaacgatgacgattgcatctggtgttttacccaattgtgggactttaatatctaagaatttttcagcgcctaaatcagccccaaaaccagcttcggtaatggcaatatcgccgagttttagagccgtttgggtcgctagaatactgttacagccgtgcgcaatattggcgaacgggccgccgtggactaacgccggtgtgtgttcaagcgtttgcactagattgggttttaaggcatcttttaataacatcgcgatagcgccagtcacttttaaatcagcgacagtcactggttggcggtcaaaattatagccaatcacaatccgactaatccgggcctttaaatcggtgatatcggttgccaaacaaagaatggccatcaattcactggcgaccgtgatgtcaaagccgtcctgtcttggcatcccttgcactggtccacccaaaccaatgaccacttggcgtagtgcccggtcgttgatatctaacgcccgtttccaaataatccggcggggatcaatgtttaaaacgttgccctgttggatatgattatcaattaaagccgctaaagtgttaacagctgacgttaaggcgtgcatgtcaccggtaaaatggagattaatatcttccattggaacgacttgtgcgtagccaccaccggttgcgccacctttcatccccatcactgggcctaatgacggttcacgtaaggcgattacggcggacttgtctaattggcgtaacgcatcgcctaatccgacggtcacggttgatttaccttcgccggctggtgtcgggttaatcgatgtgactaagactaactgaccatctgcttgttgattcaaacgttgaatcgctttaaaattaacttttgctttataaggtccgtattgttccaattccgcggtttctaaaccgatttgttcggcaattgccgtaattggtttgatttcatgcgcttcgttttcctgtgcaatttggatatctgacatgctgacccactccttttattgacgataaacatattatagccgatttcgtacggaattggcagattagtttcaataaagtttatcttcgacagttactatccagcgtggtagaataaaggtgcgcgattaatgcgtggattttaaggagggattgtgatggaacgaggaatcgtgaaatggtttagcaatgctaaggggtacggcttcatcagttaccaagatgatgaggaaattttcgttcattttaccgcaatccagaccgacggctataagtccctcaataaagatgatgtggttttattcgacgtcaaagaaggcgcccgcggattacaagcggccaatgtccaaaaaattgaaaccccacaagactaactcataattaattaagaattcattagcgtacgtaaataggcaacgcatccttaaattggatgcgttgcctatttttgatgtctgattcgcttattcaacaattggccagccagctgcttttagcgttgccactaattgttgtttatctttaggctgaagcaataattgctcaggttgatagtctaattctgtcgttgttatcaaaaggccatgcttttggaccgcaatttgcgtcagcttctcacgctcaattgtgcggtgccgtttaaacactggccgttttaaatggattgcttctgaggtaatcgttacttgatagcccaagatattaatgatggttaaaataaccgcaatgagcgcaatcgtcatcgattgccaatttaaattgataagttcgagttggataattaaggctaatagatagataaagccaatccaagaccacgtcgtgataaaataagcgtaacctggttggtagcggattgttagcgatttttgcatgagcacactccttagtgttttaatagtaccattatcattactgacttgtcagtggattggcgcaattctttaagaatgattaaactttaacgcaggaccctcccatcgaatcaattgccgcttagtcccatttaacaatcaactaccaccattaacctaagtaatagccttttggcgacatatttagtaaactactcaagaagcttaatcgaattttaggagtgatcatttggcattattagcagaaataacaactttaattatttttatcaatgcagtcctcgccattattaccgttttacggcagccacgggacatcgccgcaacgtgggcttggttattagtcttgatgttattaccggtcggcggctttattttatacctcttcaccggtcgtgggttatcgcgtaaaaagattttccaaagtcagtctcagattaacgatgggattttggcgttggttgatattcaacgtcaagaaaatcgtaaaaatgaattattgcctaaaaagatgctttcgagtgaagcaacagaaatggtcaatttatttttaaatattaataacgcccccgtcttaaaggacaaccacgtgacgttgtacacggagggccaagaaaaattcgcggccctattcaacgatattcgccaagctcaaaaaagtatccatatcgaatattacaccatctacaacgatcaaatcggcaatgacttacaaaaattgttagttgaaaaagcaaacgccggcgtcaccgttaacgtcttatacgatgcttggggttctcaaggcgcaagccagaaatggtggcgcccgctcgaagaagctggcggtcacgcccgcaccttcttcagttctaaacattcaatcaccgattttcggctaaatttccgcgatcatcgtaaagtggtggtcgtcgatagtaatattggttacatcggtggttttaacgtcggtgatcaatatctgggtcgcagtcataaatttggtaattggcgcgatacgcatatgcgggtcacggggaatgccgtattagcgttacaggttcgttttttaatggactggaacgcgagtgttgaatctaacgtgcaactcccctattctaatgatctatttccaaaagaagttgcctctaaacgggggtcggctgcgatgcaaattgtttccagtgggccggataaacttgacgaacaaattaaactcggctatttgaaaatgattagtaccgctaaaaaacgtctttggattcaaacgccttatttggttccagatgatagtatcattgatgcgctaacgacggctgcgatgtctggtgtcgacgtgcggatcatggttccgaatatgccagatcatccgttcatctaccgcgcaacgcaatattatagtcaactgttacacgcaactggggttaaaatctatagttatcaaaatggttttttgcacgctaaaacggttgtgatggacggtcatatcagtacgattggttcggccaacatggatattcggagctttaaactcaattttgaagccaacgcctttatttacgatccgaaagtcgccgcgcaactcgaaacgatatacaaagctgatatgcaacacgcgcaattgctaaccgatgagattatcgcccaacaatctaaatggattcgttttaaacagaaattttcacgattactctcccccattttataaaacgttcgggtaaaactatttaagttgtcagtcattaagttgtccaacattttttatttaaaatcaaacgttagtcccacgcgggttaatgaattgttatgcgtttaacccacaaaatagccattgactttagtagtgattatggttaactttataagtgaacagttcacgtgtgattcaattaatcattcggcaacagcccctagttataggggctgtttttcatttaaacacaacatctagtattaaatcattgcaacttcattttcgaaacggtatactaattttattaattagattcttcaagggagttaaatgatcatggcaaacattacattatacactaagaacggttgtccccaatgtcggatgacgaaacactttttggagacacacgatgtcactttcgttgaacataacattaacgacgaccctcaatatattgattacttacgcgaaaacggttttcaagccgttcccgtattagaagctgatgggattgatagcttttctggtttcagacccgctgaattacaaaaattagccatctaataggcgctttattttttgttagactaactcgtccctagagttagtctttccctttttttaaaccttaattttgcagaaagtggtgcttaacaatgtctttaaaagaaatccgtactgaagatgtcacctattatgaactcaataatcaaattaatattccggttgacggtcaaattccgttacataaggatcaagaagcgctcgatgcttttctagaacaaaatgtgcaacctaatatggtgacttttaagtcccttcaagatcgtctagattatttagtgactgaaaactattatgaagctgattttcttaaagcttattcaatcacttttatggaacaacttaatcagtatttgattgaccaagacttccatttcaaatctttcatggctgcctataaattttacgcacaatatgctttgaaaacaaacgataatggtttctatttagaagattttaaagaccggattttcgtcaacgctttgtatttcgcagatggcgatgaaactttagccatgaatctagcagacgaaatggtgcatcaacgttaccaaccggccacccctagcttcttaaacgccggccgttcacgccggggcgaattggtttcgtgtttcttactccaaacaaccgatgatatgaactccatcggccggacgattaattccgcactcgaattatcccgaattggtggcggcgttgggattagcctgtctaacttacgtggtgctggtgatccgattaaagggattgatggcgctgctagtggtgtcttaccggtcatgaaattattggaggattcattctcatattctaaccaactcggccaacgtcaaggggccggtgtcgtttatttaaacgccttccatcccgatgtcattgcctttttgggggctaagaaggaaaatgcggatgagaagtaccggttaaagaccctgtcactcggtttaatcgtgccggataagtattacgaactggttgccaacgatgccgatatgtatcttttcagcccttacggtgttgagaaagaatacggtgtcccttattcatacgtcgacatcaccaaagaatacgataatttagtcgctaacgatcaaattaagaaaacgaagattaaagcccgtgatttagaaaatgaaatcagtaaattacaacaagaatccggttatccgtacatcgtcaatattgatacggccaataaagccaatccaattgatggtaaaatcatcatgagtaacctctgttcagaagtcttacaagttcaaaccccttcacaaatcaataaccgtcaagaatatgacgtcttagggactgatattagctgtaacttaggttcgacgaacatccccaatatgatgacgtcacctgattttgggcattcaatcgaagccatggtccgcgccttgacttacgtcacggatcattcggatatcgatgtggtgccttcagtggcgcatggtaacgaactcgctcacaccatcggtttgggtggtatgggcttgcatacctattttgcgactcaccaaatgttgtacggctcacctgaatcaatcgactttaccagcaattatttcatgttactcaactattggaccctcgtggcttcgaataagattgcgaaagaacgccatgaaacctttgccaactttgataagagcaaatatgctgatggcacttatttcgaccaatacctgaatgaagactgggccccacaatcaacacaagttaaaaccctctttgaaggcatcttcatccccactaaagcggattggatagctttacgcgatgccattatggcggacggtttataccatcaaaaccgtttagccgttgcaccaaatggttcaatttcatacattaacgatacctctgctagcctccaaccaattgtcaaccgcgttgaagaccgccaagaaaagaaaattgggacgatttactatccagctcctggtctttcaaacgaaacgatgccgttttatgaatcagcctacgacatcgatatgcgtaaagtgattgatatctacgccgctgctcaaaagcacgtcgatcaaggcatgagtatgaccctcttcatgcgttcaacgattccagctggtttatacgaatggaaagatggccgtacggataagatgacgacccgtgatttaaacatcttaagaaactatgcacatcacaaaggcattaaatcaatttactacatccggacatacactgatgatgaaaatgaagttggcgcgaacgcttgtgaaagctgtaccatctagtcagtcaaggggcaatttgccccggatacatactaaaaggagtcaattgaaatgacagtaaattcagagaattacattgcaattaattggaaccaaattgaagatcaaattgataaagccacttgggaaaaattaaccgaacaattttggttagatacccgaattccattatctaacgatttagacgattggcgtgacctatccgatcaagaaaaatggattgtcggccacgtctttggcggcttaaccttactcgataccctccaatcacaagatgggatggcgagcttgcgcgcgaacatccggacccaacacgaagaagccgtcctcaataatattcaattcatggaatcagtccacgctaaaagttattcatcgattttctcaactttgaatacgccgagcgaaattgacgaaattttcgaatggaccaattcgaatcaatacctccaatataaggctaataagattaatgatatttaccaaaacggcacgccacttcaacaaaaaattgccagtgtcttcttagaaaccttcttattctactctggtttctacaccccactctattatttaggcaataacaaactggccaacgtcgctgaaatcatcaagttaattatccgggatgaatctgtgcatggtacttatatcggttataaattccaattagggtttaacgaattaccagctgctgaacaggatagtttgaaagattggatgtacgatttattgtatgacctctacgccaacgaagaaaaatatacacacgaagtctacgacggcactggttggactgaagaagtcctaacttatctccgctataacgccaacaaagccttaatgaaccttggacaaggtgcgctcttccccgataccgctgaagacgtcaatcccgtaattttaaacgggatgtcaacttcgaccgccaaccatgatttcttctcccaagtcggtaatggttaccgtctgggtaatgttgaagccatgagtgacagcgactaccatttcgactaataacctagactgaaattccaagtgaatttcagtcttttttaatcccctattatcgtcaactaaggtataatgaaagcgtgttaatcatgaagggagtcctgtttgatgtattacgttgttatgccatctaatgatattcgtcgtaacttggcgactgaacaatatttaatgaatcaaaaacatttcgatgaacctttgttgctcttttatattgaaaagccctgcatcatcgtgggccgtaatcaaaatacgtttgaagaaatcaatcaacaatacgtagaaggccacaatataaccgttacccgccgattatccggtggtggtgggatttatcaagatcttggtaatctttgttttagtttcgtggtggatgccgattcagaacaattcggcgactttaaatccttcacgcaacccatcgttgatgcgctccaccagatgggcgcaacttcggcggaagtttctggccgtaatgacatgttagttgcgggtaagaagttctccggcaatgcgatgtacaccaagaacggcaaaacgttctcacacggcacgctttcgtgggatgtcgatttagacgtcttaacccaagcgctcaacgtgccagcggataaaatcgcttcgaaagggattaagtcaattcgccaacgcgtgacaaatctcaaaccgcacgttgattcacagtatcaaaatatgacgaccgaagaatttcgggatgttttattattaaacttattccacgccaccgatttagccgccatcagtgatcgtcaatatcaattaaccgatgctgaccaagcgggtatcgatcaactctttaacgacatctacagtaattgggattgggtctatggtaaatcacccaactcaaccgtccaaaaacgccagcatttcgattttggcacgattgatgcccgtttactcatcgagcagggtaaaatcgctaacgtgaagttctatggcgatttcttcggttctggtgatgcgaatgaattggctaagcaactgcaaggcacaatttatgatcgccaacacttaactgaagccttagctgatattgatacaaccccctattttacgggaattcccaaaaccgaattagtgacattattagcccaataaatcaaaaaagctgtaacagaactcggttatcaaaatactttttataaaaatgctgcagaactataaagcagtagtgtattatgaataatataattgagaggatggtatacaatgactatttggaatcgatattctaatgaacagcaatatgaatatattgaatatttaaaaatgtatggcgcgctatctgctttgtttaatcaaaaggctagtacaacaggtgcaccatatttagattcaaaatatcaagaaacagtttatgctagaagttttcattctgaagaagttgacattggtaatacaccacatgatattaaatcggtaattgataataaaaatattgggattggcattaaaacatggttaaatagtaaaccatcctaccaaaaagtaatgcaattgaaaagttttaaagatgaaattgaatgttttagatatccagggaaagaagctgagttggcgggtaaaattgcttcaataaaaaataaaaaattgttagtagattatggtcgacttggattggtgaacgataaaaatatttatcattttgcaacgcgtgacgaaggaactgttgtattgcgggaaactacgtatccgatgatagaacttaataaattatcggattttaatttaagtgagaaatcattttcttttacggatgggttaaaaaaatataaatatacatttggtgacagtcaaatttggatgtactttgatcctcaagcagaagatacgtatgaattaaagtcaattaatattgatataatgcaaaatccttttgattttttaaaggacgcttttagcaatatttctaaaattatagttcctacggtaagagatgcagtttatttaccattatattcagtacatcaacaaggggttccagaaaagtctggcttaaatgcatcacatgggtcatctaaaaataaaaatagtggtttgcctagaccaaagtatgaagcttatattcctgttccgaaggaatttcataataaatatccaaattggttctcggacactattgatacaagtaaatataataataaagctattgaattaaatttacacatgcctaatggagaagaatatccagctagactaactcaatcaggatttaaaagtttacaaacaaatcctcaatcagttttgggagaatggttaatacatgaagtattagggttcgatgctaaccatattattactatgggtgacttggagaatgctgggtttgatagtgttaaagtatggcatgaggatataaatgataaatcacaaatatgggttgattttgcaccagttgggtcatataaagaatttatgagtggtaatattcctgttgaaggtgataactaaaaagagtggggaatacccccactctttttagttatccaattattgtcataaaagtactttgtttatttttattaacgacattaaaaaattcttcatcagtgtagagttctaagttacttaacttttttgaattatcaatatagtttttagcttcttcagtactattgaaaaaatcaatagggtaagaagagccttccatgcgaccaatcattgtagtctttaagatagcaaatttatcgtttgtttgaggtaatttattcttaatgttggaggaagcagaaactttcagaatctgttcagcaattcttgtaataaccggaattgaaacagaattaccggcttgtttatataaaggcccattcgcctcatcatcgggaagggtataattttggggatacccctgtacattgaacgtttctctaggtgttagcttacgaatttcttggctatcagtaagaataagaggaacattgtgtccccccgttcccatattggcagtcaaagttggaacaacaccacttttattttcgcgaacgtattgtctacgccactggtaaacagtatcttgactggtcatagcttcttttaactcagggtaaaacgtttgtttctcttcagtataatagtattttctatccacaatatcattgaatttaatgacctcagataatttagttgttaagggaatcttttctggaaactcaaattgttcataagcatctatatttgtaaaaccgactatataaattcgttctctattctgaggaatatttccataatccttagaatttaggaccttccacttaatataatatcccgaatgtactagaaattctctgataactttaaacgtatttccgtggtcatgagtaactaaattcttaacattttctagaaatacaataccgggtttaacagcctttataattcgtaaagcttcaaaaaataaatcgccacgttcgtcttccagacctttccggtatccagcaattgagaacggttggcaagggaatccggctagaactatatctgcatttggtaatttactagtttgaacgttacgtatgtcattaccgtctaaaagggtatcaccaaaattagcagtatatgttttacgggcatttttatctacttcgttagcatatacggtttcgaaatcgccagcattactaaaaccgatgtctatcccaccgacaccagcaaataaactaatcattttcatttttatgccattcctttcgtattttattaataaatcttttatctattatagaggttttttgatagaattgctgcaaatttattttatttatgaaatttgttatgcttgacctcataattaatatacatataaatacgtggattttttgtagattctatttagagttttttcttcaaagaattggttgatgatgtccttgcgactgtcttgtttaaggcggacggctatgaccaatcagaactgctaacgattggtaaaaaatacactcgtaaagatgcttgtcgtttattgggctgggaaaaagatcaaacttcaacaatttatgggtataaaacggcttatagcacttgtccattatttattacctatgccaaatcgcaagatattgatgacgggatcaagtatgaggatgaattgttaaatagtcagacgatgcggatgtttacgcgccatccaagacgattgagttctcaagaagttcaaacaatggttcaagggaatgcagccggtgacataatcatgccgttatttgttaagaaaagcgacgatgaaggaatcgatttttactacctaggacttgtgaatattgatcaaaattcactgcagcaagaaacgatgttaaataagaaaggaaaggaagttccagtcgtcacaatgaatttaatcttagaaaagccagtacaatatcagctttatttgaatttgacgaaggattgattctgtttattaactgaacctcaaatagcacaccccggatccgaagggtgtgctatttaggttttacattttaaattttcaacaaggctgctgctgcttggctatctgtaatcaaaacgttggcgtagccaccagataaagcggcgtgaatggaagcgacctttttactagaacctgcaatcaacatcgaatatttcttatgttttagggcttctagagaaattgcaacggttcgggcatcgatatcgggatcggcaatctgaccgtccggggtgatgaatctagagataatatcgcccactgaatttttttggacccgctcaatttcagccggacttaaataaccgagattaaaaagcatcgcgttgctgcggacggtgccactggtgaaaagtgcgatgttggttctcaggccagcctcgattaaggcttgaatgaatcgatctttgctgacgatttctttggtgacggcattatcgaaaataacgggtagtggtaaattcaaagtattagtttgaaaggcattcccaaacttttgattgatatcgttagcaaaattattcatatcagaagcaggaacgctacctttgagctgaatcaccgaaacatcccggcgttcgctgggtttgagatgactagcgacggcttcaatggtttggccccatgaaataccgattcgatcgtgatcttcgacaatttcgtccagaaattgggcggcgagttcgccgagtttgtcattaatcagcgtggtgtcgttggtggtatcataagcaattaaaacttttttgagttggtatttttgttctaattgtgttgcgagcatggttaaattttcaagtggatcaataatttcgattttaaccagtccttgttctaacgcagattgtagtaagcgtgagacagttggccgggaaattgataattttttggcgatttcattttgactgaggttgccttcatagtagagatggcaaacgttcagtgtcagttggattcgatcattgctaacggatttcataggtctagagcacctccaagtaggtagtttacattagtattgtaacatagtacaataattgaaatgaacatattctcaaatttagtatttacatatgttcaattcgtggtatcataggtttgtagataagaagggagcactaaaaatgaaattaaatcgttatttggaccatacattacttaaagcagaagccaccgagaaacaaattgatcaggtgacgcaagaagcagcagagaatcacttttattcagtcatggtgaatccatattgggtcaatcacgttcatcaaaaattgcaaggaaccgacgttaaaacagcctgtgtgattgggtttcctttaggcgctaacacaactgctatcaaggttgctgaagccaaacaagccattaccgacggtgtcgatgaacttgatatggtcatcaatattggtgaaatgaagagtggtcattatgatcgggttcaaaaagatattgaagcagttgttgaagccggccatgccgctcaaaaaatcgttaaagccattattgaaaccgctttattgacggaaacagaaattactaaagcgagtcaattagttgttcaagcacacgctgattttgttaaaacgtcaactggattctcaacacgtggtgcagcgattcacgatgttgaattgatgagtcaagctactcaaggaagtcaaacgcaagttaaagcttctggtggaattcatagtactgaagaagccgaagccatgattgcagctggtgcgactagattaggtgtcagcgcaagtatgcaaattattggtaaataatgtcaaactaacgggaatttcttagtgagttttccgttaatcaaggaggttaaagcatgcaagcaagtgttagtacggtaaaaaaaagtcagggtcatttaattaaattacgagcgaaagaacaagatgatggttatctcgataaaacccccgtttttcaatatattttattatcattactatttccattgtgggccgctgcggcgagcttaaatgatattttaatcacacaattcaaaactatttttacattgtcgaacgtcgcgagtgcgtttgtgcaaaccgcgttttatctgggctatttcttaatcgcaattcctgcgtcattgatgattaaaaaagcgtcgtataaggtggccatcatgattgggctatcattgtatacgattggttgcgccttattcttcccagcctctagaatggcgacgtacggctttttcttagtggcattatttgcacttgcttgcggtttaagttttcttgaaacatcggcgaatacttttagttcattacttggaccaaaagaatcgtcgacgcttcgactgaatatctcacaaaccttttatcctattggagcaattagtggaatcttattaggtaaatatttaatcttcagtaagggtgccagtcttgaaaaacaaatggtcggtttaagtggacaagcacggattagatttggcgaacaagctttgcaacataccttgttaccgtataaatatctgattgcgattttattaatcgctttggttatctttgccatcacgcaatttccaagtggtaaacccaagagtaagacggttaaagttaattccaatgcgaagatttcagaaacgattaattatttagtccataataagaaattcgttcaagggatttttactgaattcatgtacatcggaatgcaaaccgcggtctggtcatttacaattcgattagcgatggaattaaatggtaatattaatgaacgtagtgcgtcaacctttatgatttacagttacattgcgttctttgccggtaaaatgatcgccaacttcatgatgaagaaaatgcaaccatcccgtgttttacaaatttttgccgtatttggaatactagcattactttacattatcttggttcagaatatatcagcggtctatttcgctataattgtaagcggtttatttggaccttgttgggcaacaatttattcacaaacactcgatacggttactgataaacgccatactgaaactgctggcgccattattgtcatgtcaattattggtggcgcattgattccgttagcacaaggctttgttgctgacatttcgacgatttcaatctctttcgttgttaatatcgtttgttttgcggttgttttaggttatgcaacggggaaaatgcgagaatacaaagctaatttataaaactaaaattaaacgatgattaatgatgagaaaggcgaaataataatgaaaaaaattaatttaactcatgcgatgtttggcgcaaccgattttaaattatatgaagatgatcaatttaacgtcacaacgtttacatatccttcaggtgttgaagggctaaaagtggcgaatagtcaggggcacttggtcgttttaccatttatgggattgattatctgggatgccgtttttgccgggatttcgcttaagatgaaagatatgttttcacaaccttatccgggcaaaggaatcgcagatacgtacggttgtttccaatttacatccggattattaggcaatgggacaccgacaccagaagatggttaccaattgcatggtgaatttccaacgagtcaaatggatcacgcttatttgaccattggcgaaggcactttaacaatgcacgccgattttgaatatgttaagggttttggggatcactatttgagtgaaccatcagtcactttacatcaagattctggtttgttcgatattaatttaaccgtgacgaatctatcaaaatatcaagtgatgccactccaatatatgtgccatatgaattatgcttatgctgtaaatggcaagattgaacagaatttaccagacgatgctttccaattacgccaaacgattccagctcatgttcatccaaccgctgattggatcaagtataatgaccaactaaaagcgagtcgtgaattgattaatcaattggatgatggccgtcaatatgatccagaaatcgtctttttctctaaggatttaactgagtatgttgacgaagcggtctttagaatgcatttagatggacaacataattttatgactaaatttaaaaccgcgcagtttccaattgtgacccgctggttattatataatgcggatcaacaagttgcggcctttgcgttaccaggaacaagtacgccagagggtcgaaatgccgccgaacaggctggcactttgattcatctgaaaccacttgaaagccggtcattcacagtgacgactggtttggaaaaataaggagggacaacgatgactgatattactgtaattggttcaaacatgtttgaattaaccacgtacactgatcggatgccggtgcaaggcgaaacgattgaagctggtgagtttgaaatgggttttggcggcaagggtgctaaccaagcgattgccgcggctcggctcggctcagccgttaattttatcacgatggttggcgacgatgaattcggccaacaacaaatcgataattatgaacaaaatgggattagtttaaaaggtgtcggcacgtgtcatggtagtagcggtgttgccccaatctttgttgatccaagtagtgataatcggattctaattattaaaggcgcgaatgaacaactaacgccagctgtgttggatcaccaaattgaattgattaaaaattcaaaattaattgtccttcaacaagaaatttcgttagaaactaattatcatgcgattgaactgggccaaaaataccaggtgccagtgctgttaaatccagcacccgcgaatgatcatttaaacattgattatgtttctaaaacaacgttctttacgccgaacgaaactgaattagcaacgttaacggggatgccaaccaccacgcttgatgaaattaaggccgctgcttatagtttggttgaacgcggtgtacagaatttaatcattacactcggtagcaaaggggctttgtgggtcgatcatgatcacgatgaaattattcccgggatgaaagtgaaagcggttgatacaactggcgccggtgattcctttattggtagttttgctcattattataccgatggcgaagcaattggaacggcattgcgtcacgctaatcaatatgcagccatgacggtcaccaaacgaggcagtcaaaaatcctatccaagtaaacaagaactaccagcattgttggcacaataccaacttcaaaaagtttaataggtagtcaaaaaagagcattgaattttcaatgctctttttaatatatcttgcctgcgagcgtaactgattttttatctgtaagcgtttttttagtaattaggtagttatttgaactgttaaggattagttgacagttcaaatacaaaaacctggccatcattcatcgtgttgaatggtggccaggtttttaggtttaatcagatgttagaagaacagtccgccaatcttcatcacgagtgaaatcagtgcgagtagcaagatcagccattctgtctttgagaaatgtttgtaggccactgcgaaagttagtcgtagatggcggccaaaactgtttgcttggtgggtctcgggatcatcccaatgggtgacgaccagcgttaacagcaccactaatgggattaagaccgaaaccgcagtgaaaaagcggggattaaaaaaagaatatagtgtcagtaatagtgtcaaaacggcgatggttaacgtgaaattgcggagaattttctgagtcattaagtggtgctcctaatcattgatgatagtgtttattttttcagtatagcataaaaaaagcagtgtcccgtccgttttaccggttagggcactgctcttaccacctattattcaaacattttcttagtggcacgcattaaggtcttgatgtcgcgatcgtaacgtggtgtttcgactaatttagccattggcacaccggcgaaatggtacgcggcaatttcgccagagcgaacggcactttgttcggtgaaaatcatctggtaaggttgttcaacgaattcaccagtgaaggcgaggttggttgaatgatcagggatgacttctggccgatcgattttagcccggttgttgaatagcgctgaagcgtatggcatgtaaacagggatgttattgatgacactgtccatgatttcggcttctttttcgcggatattgacggggccgggatcgactttggctaattggccaattaattcttgaagcatgtctttaccggtcatttcgatgtatggtttatcgacaaattcaccggtccgccgtggatacaagaagtaaccccaaataacggcttcatttggtttttgcgtagtgaaatgcggttgatgatgaacaacaatcgacatattgacgtctttatgacctagcgcggtaattgggcgcgttgataggaatgagtttaaggcgttcccaggtgcttgggtcgtgatccgttcgatttcatttaagagaatatgatttttagtcgttaaggtgaagctgacccattcgctggcgttgcggtcagcgaagaatttgtcagaattgcctaagttgtagaattgagaactgatttgcttccaaagaccagcggctgccccgtaatccatgttttcagcagcgggtgtgttgtaatcaccgagggttgcggaatcagtaatcgaaccgttggtgaagatgacggcggtatcgtcgtcaacggcgacgtgttcgacttcatcggtatcgaggttagtcatcgtcaaaccagtgaccgtaatttcatcggtcatcgtggtatctttgaaggtcatatcagtgacgcgccggtttaaaataatttcgcaaccttgcgccttgagatagttgatgatgggtaacatgatactttcatattggttgtagcgggtccggttaaccccgactaagtgttcgatttgagtgaattcgtaaatcatttgatgcatgtaacgccgtaattcttggacagaactttgaatccggaaggcaaaagtcgtttcccacatataccagaaattagtttggaacatgtgtggatcgtccttgaagtaatcagcaatcgacacgttgtccaatttttcttcttcagaatcgggcatcataatcaatttggtcatcaagagccggtctttggtgttgaaacctaaatggccagcttcgagaatccctttgctgccttcgagtaagcgtgctttgtcaaaagtccggtgttgggcatcgaaactgcgggtgtcttcagcaacagtcatgttcggttcagtcgccgatggaatgcggtctaataaatccattaaatcaacataggtccggtaatttaacatccggccgccacgtgcgacgtacccttgcgtgttttcgagtggatgattctggttccaatattcatcgacttggtcggaaacggttgaaccatcgtttgaaccgtggtcgtcgattgaatagaatttaatcgaatcgcctgaccaaccaccttcttgaattaagtaaacagctgcggccatatttgctagtccagcgccaatcattattgcttttttcttaatcatagaatagcccccttgttaactttagcggtattgcgctaaaaattaacgactttcgaatttttcgtaatcaactgaatcgtctctaaatagttccattttcttagcaagcaagcatgcaccagtggctgcaatgcccgtcacgattaaactaccgattaaaaattttttcatgttgttcacttcctctcatcagctacttttaacgtctacattataacgccgattggttaaatgtcatagataaaacccttacaataattaattattaactatcttttgagattcttaacatgttaggataatgacagagcatattaagaggtgatgaacatcgatacgaagcagcatttagccaatacgttaaaacaattaatggcgaccacaccggtcgatcatattacggtcaaccaactaacgcaccacgccaacgtagcgcgcaatacgttttattaccattttgccgacattaacgaattggtcgcgtggatctataatcgtgaaatcgtcacgcaactagcagcttatcggcagggtcaggactggttaaaaggcttagatttattggtgacctatatcgaaaccaatcggcacttttgtttgaataccttccattcgatgaatcgggatttattgagtcgttttttataccgggtcgcctttacgatggtggcgggggtcgtgactgatttgaagactgattgtgcgccaacgttacaagatgaaatcgccaatttctatggctggtccttggccacccagatgacgcaatggttggtgaccaatcttgaagaaccgaaacaggaattttaccaacgcatgcagcggatgttgaacgggacgattctgcacatcttacagcaaaatgcctaataatttgggcaaacgcccctgattgtccatagcttacccgctagtatccggttacagtgaaggagtaggttcactgcaattattctaggaggcgagtaagatgttcttatttcaacagatttcagcaatcgattggctaatgtgggtgttagtcgtcgcagcattgatgttactaaacgaagcagcccgcgcgaataaatgggtcgcaatgcttttatttattggggtgcccattattttaacgttgtttgtatggccgacaacggccggacccgatagtagtacggggacttggtttcactgggtcaaagtctattcagctttagcgggttgtctgggcttcttggcattacggtttagtcctaagttacaagccaacaaatgggcgctggtttttccacctgcgattctagcgtttaatattatggaagctgtgattcgcgatttccaagttgctgggttgcatggtctagtggatggcgtggtcatgaatggtggcgcttggaacatcatgaacgggatcgccggaatcatcaatatcatcacgatttctggttggttcggcatcatgattagtcatgataagcaaaaggatatgatctggccggaccaaatttggccgtggattatcgcgtacgatgtttggaattttgcttacgtgtataactgcgtcggcgaccattccttttacgctggcggggcattgctagtgtcctgtacgttagccgccttcttcgttaaaaaggggagctggctacaagcgcgggctcaaaccttggcgttttggatgatgtttacgatgagttatccaacgttcgtcacggattcagcttttgccgttaagagtagtcatagtagtgccgcgttgatgacggtcagcagtcttgcgctattgattaacgtcgccgttttaatcttgcatatttaccggacggttaaatatcgtcgcaacatcttaacggatgatatttatgcgggtacgaaggcgcatgatcaagtgattgcggataatacgtcaaacaattaaaaataaaatattagaagaacaagctgtgacagaactcggttatcaattgagtgctaactcaagttggtcaggctttgaggattaacctaaaaatcagcgttatgatttgtactttgaatcataacgctgattttgtagttaaccggaaaagactacttgagaagcacgttatcaattgagttctggcgcgcgtcaataaataatattcgtttaatattagaacactacgacttatgtcacagcttctttttttacaatatttaagttagtttaattgttaagggactgtccttaatttatggtagaataacggcattaagcatagaaaagaatggtgaggatagacaatgattcttgaacgcagaaatcaaatgaattttaaaaaattagcaggttccgtcgataatccccccgaaggaatccgggtcgcagaaatgcaagaactcgcacatctttatcagctataccaagccggcgccaacgagattggcaccaaattagaaaatttggacagtgaattccaagtcaactatgatcacaacccgattcatcacatggaggagcggatgaaggaagttgccagcctgctggagaagttaaagcgcaaaggttatgaacgttcaatcgaaagtattcaaaataatatttttgatattgctgggatccgagtgattaccaattacattgatgatgtttatctgattgaaaaaatgttgttgaatcaatctgacgtaacgctagtgagacgcaaagactacattcaaaagccaaaagcgagcggctaccggagtttacacatcgtcgtcgcggtaccggtttttcaatcaaagggggcggaagtcgtcaacgttgaaattcaaattcggacgattgggatggaaatgtgggcgagtcttgaacacaaattacggtataaaacggatattggcgccgatgtggtggctcaatacagcaccgatttaaaaacctattctgaagaattaacgacgattgaaaccaagatgcaagctatttatcaacaattaaatcattatctagattaaatctggaatagagccgcatgatcaatggttaacgccgattgatggtgtggttttattttttttaataaaaggcttgccttaaagtcaactccaaggtttatagtgaacctattgaacggaggttggtcagatgacaaagaccattattatttatttttcactgagtgggacgactaaaaaggcggccgaggccattcaaaaaacgacgcacgctgatttagttgtgttaaccccgacggttgcttatccacaaagttatgatgctgcggtggcgcgcgggcaggccgaattagagcatcatcagttaccggatttacaagtcacgtggcctaatttaaaccaatatgacacgattttgttgggatttccaacgtggtggcaacaaccgccgttaatcattgaggcctttttacaacaagccaaattgaccaatcagaaaattatcccctttacaaccagtgctagtacgccgatgactgattcaatggcggttttacgtcagtgggtgcaaccgactttactaggaaccggttggcgttaccaagcgaattcaagcgcgatgaccgcttggttagcgcagaataaagtataatcagctttaaagggatccaatttaattaaggaagtgaccatgatgaacattaaacaagctgcagcaacgtttaacttaaccgcggatacactgcgctattacgaacgggtcgggatcattccaccgattccccgtaatcaaagtggttaccgcgattatcaaacgaaggatttaaactgggtctacctagtgacgcgtttgcgcgcagccggtctttcaatcgaatcattgattgaatttgcgaccctctcccaattacggggtcaacaaccggttgaaaccgcgcagaaacaagtgttaaaggatcaattggctgaattagaaattaaattagccgaaatgcaagaagtcaaaaatctattaacttataaaattgaaacgtacgacgagcatatcgcccagttcgagtcgggtgagctgaccgctgaaaatcaagaagcattgtggcaaaaaaattttaaacaacaggagcaatataatgaaaaaaattcaattaaataatggcgttgaagtgccagccttagggtttgggacttttcaaatcacggatccaatcgaagccgaacaagcagttaaagaagcgattcaagtgggttaccgccatatcgatacggcgcaaagttacatgaatgaagcggctgtcggcaaaggcatccaagcatctggcgttgatcgcaaggaattgtttatcaccactaagatttgggttgaaaacgtcagctacgatggtgtgatgacgtcgtttgaacggtcattacgccgtttaaacttagactatgttgatttattattgattcaccaaccttataacgatgtttacggtgcttggcgcgcgatggaagaactccaagccagtggcaaaattcgtgccatcggggtctcgaattttgcagtcgatcgggtggttgatctagctgaatttaatcaagtcacgccacaaattaaccagattgaaatcaatccattccaacaacaaaccaccaatatcgcagcgcttaaagccgaaggggtagccgttgaagcttgggcaccattcgcagaaggtaagaacgggatttttaccaatcctgttttacaagcaattggggctaaataccataaatcagtggcgcaagtgattttacgttgggtggttgaacaagatattatcacactcgcaaaatcaacgaaacccgaacggatgcgcgaaaacttggacatctttgatttcgaattaacgaccgaagatcaagcagccatcgcgacgttgaacgtcggtgaaagtcaattcttctcacacgccgatccagccagcatcaaatggatggccagccggaaattgaatgtttaatgaaaaaataagctgtgacagaactcggttatcaattgagtatcaagttaaaaatgcggtctatcccgaactaaggatagaccgcattttaaatttgaacggaaattgatgagttctggcgcgcgtcaatagataatgttcgtttaatatcagagtatgacggcttatgttacaaactcttttgggttattcacgccagtccacaacgccggtttgaaacgcgttagcttccaataaatcggctaaaacgagttggccgagtgcatcggttaacgccgcttcgccttgtttcagagtggcttgaatcaaagattcgctttgctcgatgtgttcgggattgcggaataagcgggtcgtcagttgcgacggttggtaatctagtagttgttgatcttcaacggccaataaaacgtcggcgagagtgatggtcgttaccgcttgattcaacgtaaaaccgccatctttactcgcattcgatgtaattaaatcagcgacgacgagttttcgcaaggttttctttaatgatgaatcggagacttctaacagttcgctaagccgcgtactttttagcggggcatggtcttgttgggtcgccagaatgagtaggacgaagacgctagtttcaaaatttttaggtaatcgcatatatagactcctttagatgagttgatcgagtaattcttgcgctactgcgctaacggtgactggtttgaacgttgcgctgaataggccgaagaattttaagagcggcaccagtttagccattgaatcgctgcgacccgcaccgtaaacaagggttggattaaccgttgctaagcgcactggtgaagtttgtaattgcttgatgagcttggctttgagtgttacgaaaggtttggggccgagttgaccgccaatcatccccattgcttgcgcctgatgtgtttcggcgattttttgcatgacttcagcgggtttttggttaacggcgattagttccgcatcagttttagcgggccggccgacaaaatcaacgatgtaatcgatttgttccggaataacttgattaaccgcgtcaaaatcggtgacgtccgctgcgatattctgaatacgggaattttgtaattggttttgaccgctccgggaaacgacgtaaaagtccgctgatgggtcgcgtgttagccattgttgcgtgacttcacggccgatatagccgttgccacctaataaaacgattgttgtcatatgagtcaccattccttggattaatttattctatggaaattataattctaaggaaactgaaagtcaattaaaaagtcatcaatcgttaaacaatgtttcacgtgaagcatttggatttatttttatcattaacttgccttcgagttcactttagggtttatactcatttagcgggtttaaattttcagaaaaccttatgctataattaataaatataatgaaacaggggcgagttatgaataagaaaaatacaattatcgtcacgttcgcgttgttgttatccaatacaatggcgggactcgatggtacgattattaacacggcgttaccggcaatcatcagtgatttgcacgggattcaatatatgggctggattgtggcggtctttttactcgggatggcggtggcaacaccgttatggagcaagctaggggaacgaattggcaatcggggcgcgtatcaattagccactttattattcgcgttaggcgcgattttccaagcgtcctctagcaatattattttcttcttggtcgcacgaaccgtgatggggattggcgccggcgggatgaataccttgccgtttatcatttacgcggatttataccaaaatattcgcaaacgggcgcaagtgattggttacgcaacagccagttatagtgcggcgtcgattgtggggccattaattggcggctggattgtcgatgcttttagttggcattgggtcttttacatcaacgtgccaatcgcgttggtatcgattgtctgtgtccgtttcttcttcaaagaaacaccgaaaaaacggttatcaggcaacgtcgattatctcggcgccggcttgttgattgtcagtttagtcacgttattaacggggattcaattaatcggcactggttcgttggcgttaatcctcggcttgattgtcgcgggcattattttattagtcattatgtttcggattgaagatcgcgctgccgatccgattgtcccgaatcggttatttaaaaatcggcggttagtgattgattttatcctgttcgtcgtcttgtggggtgcgtttatcgcctttaatatctacattccaatgtgggcgcaaggcttactggggttgagtgcattgttaggcggaatgacccagattccgggcgcggtgaccaacttaatcgggtcacttgccggaccaggactggaaccgcggctgggcaaataccgggtcgtgactttagggacggtggcgtttttgattgcctttagtgggatgctgatggtcaatgaccagaccccgttctggttcttactattaatgggcgcgtttgaaggctttggtctcgggatgagttttaatgtgctccaagtcagtgttcaaaatgatgcggaagaacgggatgtcccaattgccacgtcgtttgcgtatcttttacggattttgagtcaaacgttcatgtcatcgatttatggggtgattctcaaccacgccttaacgcgtggtgtcgcgcaatcgcacggtcagattacgatggcgatgatgaataaattgagtgattcgcaaagcgtcggccaattaccggcccaattattgccgaagatgcgcagtattatgtatcaaggtttgcacaatatcatgctgattgcgaccgtcctattagtgattgtcttaatcttcaacatttggattcaaattcatttcaaaaaagaaatcaaacaagcttagttgagtgctacacttagccgattagcttctgagtgcccactcaagttggaaaatccgattatcctgaatttggggataatcggattttttgatttgaacggaagttgatatctatttcagaacttatgtttgggctataaattgctagagtgttataatatcgttacattattaactaattaggcagtgggagacagctgatgattgaatttaaacaagtgactaaagcgtacgacgcgggacttgccttgaatgatttaacgctaacaattccggacaatcaagtttttgtcttagtgggtccgagtggtagtggcaaaacgaccacgctcaaaatgattaatcgtttaattgaaccgacaaacggatcgattttaatcgatgggcagccaattgatcaaatagacttacagacgttgcgcttaaatacgggatatgtgttacaaaatatcgcgctttttccgaatctaacgattgaagacaacattacgattcaactggaagttttaaaatggcccaaagctaaacggcagcaacgggcttatgaattattagcattagtcgatttggcgccagcgcaatatgcgcaacggtatccgagtgaattatcgggtggcgaacaacaacgaatcggaattattcgagcactggcgaacaaccctaaagtgattttaatggatgaaccgtttagtgcgttggatccggtcattaaaacgcaattacaagatttggtcgtcaaattgcaacgacaattacataataccgttatttttgtgacccatgatatgaaagaagcgttgcgaatcggccaaacaattgcggtgatgcgcgcggggcacatccaacaagtcgggacggctgaaatgattttcaatcaacctgaaaatgagtttgttcgcgaattttttgatattgaacgggccgcggctgccgagacggttcaagccttattagacagtggactaggccagctcgttgattcccaaccggctcaacttcaagtgaccgattcaattgctaagttggcgcagaagttggttgattaccccaccggtgtgtccgtgcaaatcgcacaacaaacttggttgctgacgatggccgatttaaccacttttattgcgaaacggggtgtctaaaatggccactcaaatctggcatattttaaccactcaatcgggcgaaattgcccaagcactgggtcaacatctagcaatctcattagtcgcgttactgattgcggccgtcatcggaattccattggcgattattttaacggaacacaagcgacttgctgaattgatgttacaggtgacgagcgtcttgcagacgattccgtcgttagcattattgggtttgttgattccgttggtcgggattggcacggtgcctgctgtgattacgttggtgctttacgcgttgatgccgatcttccaaaatacttacgcaggactgaccgggattgatcccgctttaaaagaagcggaaatcgcgtttgggttgccccgccgtaaacagctattgcggatcgaaattccgctagcgatgccgttgattatttcaggattgcggattgcgttggtgatgattatcgggacggcgacactggccgcgttaattggtgctggtggtttgggcacctatattctggtcgggattcaatccaataataatgcgttactagtgattggcgcggcgttatccgccattctagccttaacggtcagtgctttaatccgttggctagggaccttatcgttcaaaaaaatcatggtcggtttaaccgtcttcgttggattaatcggcgtgggcactggtgtcattgcttggcgccaatcagcgaccgaaatcacgattgccggtaaactaggtagtgaacctgaaatcttaatgaatatgtacaaagatttaattttggccgatcgaccgaattacaaagtgacggtcaaacctaattttggtgggacgaccttcttattcaacgcgctaaaggccgaccagattgatatttatcccgagtttaccggcacggtgttacaaacgttggtcaaaaccaacaccaaaacgaatctagatccggccaaaacttatacaacggccaaaacagctttacagcaacaatttaagatggcttatctaaaaccgatggcctatcaaaatggttatgatttagcgatcagtgcggcgtttgcgaaacgctacaaccttaaaacaatttcggatttagcggccttgcagcaaccgattacggccggctttgatcctgatttttatcatcaacctgatggttatccgggattgaagaaggcgtatggcttacagttagacgctaagattatggaaccgagcattcgctacaaggcgattgcggatggcaaggttgatgtggtcgacggttatacgaccgacgcggaagtcgcgcgttatcatttagtcgtcctcgaagacgaccgccaattcttcccaccctatcaaggcgcgccggtgatgaagaccgcgttcttaaaggcccatccagaagtcgggcagtcactggctaaactggccggtaaaattacggcgagtgaaatgcaacagatgaattatcaagtgcaagtcaaacaccaaaaggccagtgacgttgcgcatcaattcctacttaaaaaaggcctcattcaaaaataaactaaaatcagcgtgccattctgaattgaatgagacgctgattttagtttgggcttgacctgtacgttacggcagggtctatgctaatgatagtcagaaaggagtgaatcgaaatgacctatcaaattaaagcttttgcccaactaaccggggtttcagaacggacattgcgctattatcatgaaatcaatttgttggtgccgcaacaagccgctaatggctatcgcgagtatacgagccaagatgccgatcgattacaactgattttgatgtatcgacggttgcaatttaagttaacgaccatcaaagaattgctcaagttgcctaaagcgcaacggcttgaacggctacaagcccaaaaaggattactggagctacaacaagcagcattaacacaaaccctacaacaaatgacggcaacgattgccaattatcaggaggaaaatcaaatgactgattcagctaaatttaccgcctttaaacaagctcaaattgacgccaatcaaacgacttacggccaagaagtcgtcactaaatatggcgaagaccaacaacaagcggctaatcagcactttggggaattgagtcaggcacaataccaacaaatgcaaactaccgaagctgatttagtccgtgatttgcaatgctatctggagaatccgaatgtgccgtccgcattagcccagcaaatttttacggcccaccaaacctggttacaattaacgagtcccaaatacagcctagcgatgcaccgcggaatcgccgcgctatacgtcgccgatgaacgctttgccgcgtattacacggcgttagtgggtgaccaacgcgcggcaaccgaattgaagttaattattgattattatacgcaaaatgaagaatagcaaaaaggggctgtgacataagttttagcattctgatattaaacgaacattcttcatcgacgcgcgccagaactcattaatttccgttcaaatcaaaaaatcgccattttacgctctcatttcctttttaataaaagttatactataatagagaatattgtgattataaatagtatgtaaatagtatgtaatgtgattgattatttttttgtttagttttcgaggaggatacgaaacggatgactgcagaagaacagaagcgacaccatcaccataagcaccggcgcagagggtggacattaacaaaagtgattttagttgttcttggggtattgattcttgccgggggcgcattcgcagctaaggtctatatggatgttaatcaaaccgccaagacagtgtataaatccaaaggtaagacacaaaataagcgcaaagtttcagaaaaagtcgaactaaataagaagacgcctttctcgatcctcttactcggtacagatacaggggaactaggccgaaccgaaaaaggccggactgatacaatgatgctcgcaacggtcaatccaacgactaaggaaaccaacatgttgagtatcgcccgggattcacgggtaccaatcgttggctatggtcagacggctaagattaatgccgcgtatgcctatggtggcattccaatggcagttaacactgtccaagccttcttaaacgtaccggtcgattattacgtactggttaacatgaagggcttagaacaattggtggatgctgttggtggcgtgaccgtggataatgatttggactttacctacggaggtcaccatttcgaaaagggaacagtcagtcttgatggaccaactgctttgaaattctcacggatgcgctacgacgatccacgcggagactttggtcggcaacttcgccaacaagcaattgttcaagctgttttgaagaaagctacgtcattgaacatggtgacgaattataacaaattcttgcaagtcttagaaaataatatgcagactaatatcactttgaaggatgtcttaaatattcaacaaaactatggcgatgccatgcacttcaagacacttcaactaaaaggaacgggtcaaatgattgacgggcaatccttccaagtgatgaatccaaccgaggtagcacaaatgtcgacacgtttacggaagcaattagatttgaaataatcatgaaagaagctaaccagtgatggttaacttctttcagcgtggagtaaagtaattataattgttaattaattttggagggtatcatggagcaaacgattaatattgaacagattttcagcattttacgaaagtctcgccgccttattctatcatcaacggttgtatgtacgctgttagcaatcattgttacgtttttcttgattacaccacaatatagtgcttcaactgagctcttagttaatcgtaaacaaagtacagatgttggtgcacagctgaatcaggtgcaagctgatgttcagatgattaacacctataaagacttaattacgaaaccagttattatggattcagtggcaagtaagatgaataagggggatggccacaaacttactgctggtgaacttgctagcatgcttagtgttgctaataatcaaaattcgcaagtcttctcaatcacggctaagtctgataacgcctatactgtggtagatattgtcaatacaacagcacgaacattccagaaaaaagcaccgaaaattatgagtgggactgacaatgtctcaatcatttcagaagccaaaccgaatttaacaccagtgtcacctaaaaagaacttgaacgtcttaattggtctggtgctaggggtattattaggcgttgggattgcctttgtacgagaattaatggataagacggttaaagaagaaagtttcttaacagaagaacttggtttaaccagcttaggaatcgtgaataatattgctgataaagatttgattaaaaaagcgattatcaacgtaagtagcagtcgcttatcgagaagaggatagggaaatgggcttatttaaaaaagaaaagagtttagatcaagcaagtataaaagaaggggttggcttaattacgttaacggacccgacttcagtgattgcggaacaattcagaacggttcgaacgaatattcaattctcgtcaattgatcaaaaattacggagtgttgtcttcacatctgctggcccattacaaggcaagtccacggttagtgcgaacgttgcagttacttgggctgatcaaggggttaatgtgttgttagtggatgcagacatgcgccgcccaacggttcatcaaaccttccaagtacctaacaaaaagggcttaacatccttattgacaggagataaattcgattttaatacgacgattcaaaaaacaccggttgaacatttattcgttttaccttgtggcgttgtaccacctaatccatctgagttactgaatacgaagaagatggataaattaatccaagagttaacaaagcattttgatttagtgatttttgatgtaccgcctgtagtatcggtgacggatgcacaaatcttagcaagcaaagtggatgggacaattttggtggtaccacaagggattgttgaaaagggttcggttgccaaggcaaaagagttgttagaagccgttaatgcccgaattttaggaacaattatgaatcgcgttaaagcagaaaatacgggtggctactatggtggctattatggtgccaaagagtccaagaaatagtttaaattgggggaaataaagcatggagatacaaaaggaggacactagtcgggcgtcgattgaaaatacacaccaagtaatgctttttaatcaagctgttttagatcagcggtatatttatcgcggcttaaaacggttattcgatattgttgccagtttggcagggttaattctattaagcccgctatttttggtactggcgatttggattaaggttgatgatccagcgggtggggttttctactcacagactcgtttaggtctaaaacaaaagaaatttaaaatgtacaagtttagatcaatgtgtagtgatgctgatcagaagttaaaagatcttctcaaatataacgaggttgaaggtgcgatgtttaaaatgaaagaggaccctagaattacatcagtagggcgtttcattcgcaagtatagtattgatgaattaccacaattgtggaatgttctagttggcgatatgacgcttgttggaccgcgaccaccattggaacgtgaaattaaagagtatactgattacgattggcaacgcctaatggttaaaccggggtgtactggcttgtggcaggttagcgggcgcaacagtatcggcttccacgaaatggttaaattagatttgcagtacatagaaaagagtagcttctggtttgacctgaagatcatcttgatgactgttaagatcatgattatgccgaatagcgcgtattaagcgctattttaatgtaatgagtgcggaatagaggagtaaactaagtggaaaaacatgtattcatcgtgggctcaaaggggattcctgctaattatggtggctatgaaaccttcttggagcatttaacacaaggacaacaagatacgacaattaaatatcatgttgcgtgtaaggtaactgataaggccgcagccaagcaaaagcactttatgcataataatgcggactgtttcaatgtatacgtgccgaatattggtccagcacaggcaatttattatgatgttgcagcgttaaaccaagcgattcgttatgtacggcgtcatcggatcgaaaagccaattttttatatcttagcttgtcggatcggaccgttcatgcgtgatattgcacgtcgagtacatgcaattggtggtatggtctatgttaatccagatggtcatgaatggatgcgggctaaatggagtaagccagtaagacagtattggaaatattctgaaggtttgatggtaaaacacgcggatttattgatttgtgacagtaaaaatattgaaaaatatattcaaacaacctatgcgcaatatcagcctaaaacaacgtttatcgcttatggcgctgatgcacagcggtcaaccttagccgacgatgatgctaaaataactgattggttccataaattcaatatttatgctaacgagtattatttaattgttggtcgctttgtcccagaaaataattatgaaaccatgattcgggaatttatggcttcgaaatcacaaaaagacctagtgatcattactaacgttgaacataatcagttctacgatgcgttaaaagctaaaacccactttgagcaggaccagcgtattaagttcgttggtacagtttacgatcaggacttgttaagtaagattcgtgagctggcatatggttacctacacgggcattcggtaggcggaactaacccatcattacttgaggctttagccagcactaggctgaatctgttgttcgatgttggctttaatcgtgaagttggcgaggacagtgcactttactggagcaagcagtctggtgctttggctaaattgatcaaacagtctgacactttgtcggctgatgagatcgaacaatttgataaggcgtcaacacaacggattacggacgcttatagctggccgtttattgttggtgagtacgagaaagagtttttacaggagatataatgattaatattttatatttacatgcaggatcagaaatgtatggagcggataaggtattattggagctggtttctggactagataaacaaaaatttcatccgatcattatactacctagtgaaggcgtcttggcagttgcactacgtcagcgtgatattgaagtccatatcgtttcgtatccaatcttaagacgtaaatatttcaacttacaaggtgttttaaaatatgtcaacggctactttaaagctaccaatcaaatttataagattgttaaaaatcgaaaaataaatttattacatgtcaatacaatagctgtgttagaaggaattgccttaaaacgaaagttaaaagttccattaatttggcatgttcacgaaattattacgacgccaagaattgtttataaagtaactagtttacttttaggtagatacgcagaccaagttattgccgtttcgaatgctgttgcacaacatctggttaactctggtaaagtggataaagagaaaatcaaagttatttataatggtgtagataataaagtatttaatccaaatgtaaaaattgattacttattcgatgaatttaatgttcccaaagatagtattcgtgtagggatgattggccgcgtcaatgcctggaaagggcaaatggactttttaaaagcaactgctccattattagaacagcatcctaaattatacttatttatggttggtggtgtttttaaaggtgaagagcaacgtatgactgatcttaaaaatgctgttgctgcattaccacatcacgaacgtattattatttctgattttcgtaaggatacacctaacttgcataatttttttgatatcttcgttttgcctagcacacgacctgatccactccctactgttgtgttggaagctatggccactgggaagcctgtaattggatattctcacggagggattactgagatggtaaaggataagtataatggtttattggtttcaccaaatgagcctaaatttctggcaaaatctattaatcaattgttaactaataaagaattacgtatgattacaggtaagaattctctgaaacggcagaataaatatttttctgtatacacgtatatttctaacttttcaaaactatatgatattaaaaagtaaaccaaggtttaggatagtttctataatttcttattagcggaaaggtgatttattatatgatgttcagtccattactacagagacgagataaaatattagttattgtgcatgttttaccgaaactgttaaacggattactacatgctccttttttcaaagcaagaagtggatttcaatatataggccgtcaggttcatattacacatgctaagcatattagctgtggtagaaatgttaaatttgaagattatgctgaaattcatggtctttctaggaagggattaatctttaaagataatgtgactatcggtaggggagtaatgattcgtccttctagttactatgggaaggatctaggggaggggctggttattggtaataattcatctattggaccaaatggctatgttggatgttctggtagtattagtatcggagacaatgtaatgtttggaccaaggtgtagtttatttgcggaaaaccatgtatttagtgatgagagtatacctataaaagagcagggagttgctcaaaagggaatagttattgaaaataattgttggattggtagcaatgttattattctcgacggagttactattggtgaaggatgtgttgttggtgcaggtgtattgataagcaagaatattgcaccccatagtgtggttattgatgagagaaataagattttcagaaatagataattagtctgattttatgaaataatccataattttaggtcatattgatgcgcaaactatacattaaagttataggtagtcgcaaagctgaatatactgtataaatgcgtggtgctagttcgtaatattcacaacaaaaatattcaaaaaaaggccaacaaagttagactctaggtgaagaaaacctaaggggatattaactatgctgaaccaccttgaatttaagcaaaagcggcatgaattgcaagttaacttttattcttttcggcagaaatatgcctttctttatcagcgctgcttttataatgacgacatttatgcctcaacagatcgttttttcgcggtcacggttcgaccggcgggcacaacaattactaccagttgttaatgcaattcacaatggcatcacacgagattacgctcaaccaggggagttggccatcattgatagtctacctaatccggtctgtggtcaagtacgtcattttagcgctaagatttttgctggtctagcagatattggctataacgcaactaagaaaataccattttagttgacgaatttggtgtcgaaaggaatttgactcgcagtgcttttggctttcaattcaaaaattgaattggctatcttagtctataatctaggcttttttgaatttgttacaaactagcaccacgcgtgagtaatataaacaattatggaaatcatgatgaaaagagagggtggaagtaatgtcaaaaagaattttatatttgagatctggtccgtacgagatatcgggtgcatcatataatttacaagaggtcggtttattatcagaattttgtaagcgtggaatagattgtgatttatattattactcacatgaatcaaaaaaaaagattattgacttccccactgctcaattaagaattcactggattaaaggaattaaaatattacgaagtggtatttaccctgcattacttcataaaagttttttaaataactttgatgtaataatttgttctgaatatagccaaataatgactgttttattatctaggctacatagtaatgtgtactgttataatggtccatactataatcttttcaaaataaagagtacagagaaaatctacgatagattctttttaaaaatattgaatagtaatgttaaatattttttttgcaagtcagaattagctactaactatttaaatgaaaagggaatatctaaaacgattacagttggcgtaggacaaaatattgatgagtataaaaaagatgttattccagatgataacacattaaccttaatgaaatatatggatacaaacgagtgtctgcttatcgttggcagtatagatgatcggaaaaattttccgtttacgttgaatgtatttaatcagcttattaaaatatttcctgagctacggttagtcgttgtgggtaagggggatgtgggctttatacaaaaagtattaaaaaaatatccacaacaacttcaaaaatctatatatttcttcgggatgataaataataaacaactgaaattcatatatcctagagcaaaagcttttctaatgccgtcaaagttagagatattcggcatggtacttcttgaagctatggcaaatggagtgatagctatttctagtaataacggtggggcacaaacgttaattaagaatcgcgtcaatggattcattgaacctattgataatactaaatcgtgggtggatttaatcaccaaaatactagaaaaaaatgatttagaagttatgaaaaataaagctaaagaaactattgaatctcaattctcatggtcaaatattgcagatcgaatgatagagaaaatagaaatttaacttaaatataacgtcttttaataaagaaaggaatagactgatgaaaattttattactaacttatagttgctcacctaatggtggtagtgaggagaaagtgggttggcaatgggctattaatttggcaaaagcaggtaataaagtaactgttctaaccaaatacgaaaaaggaaaagaacggataatcaacaattatttagaaagaaatcctgatcttcatttaagttttaagtatattgatatgtaccaatcaagaacggtcagaattgttaatcacatatttgattctgtatcaataagaatacaaatgtatcagttatttttgtatagggtggctaagaaagtttgtaagcatcaagtgtttgatattgttcatcaagtgacaccggtaacaattagagttttaggattctcctggaagttgggaattccattctttattggaccacttggtggaggacaggcaattccaattggtttaagttattatgctagaaatataaaatatgtcgagaagtttcgcgacattatgaattttgctattacacataatatttattatagacacgcaatgaaaaatataacaaagatttattgtgcgaatcctgaaacgcttagttatatgaaaaaaatatcgtccaatacaccattgggtttaatgtctgatacaggaggagtagagagccacaaagagttaaaaagagagtttccagaaaaaaaagttattgaaatcttatgggttggacgattagtggaattaaaaggacttgaattactatttgatgcagtgtcacaaactaagacgaaaaaccagtttattattagaattgtaggtaaggatcagaagggattacaaagttactataagcaattagcaaaaaaatgcggaatcgatgaatgcactaaattcgaaggagaaacagaatttaataggatgtcttctatatacgaatcggctgatatatttgtgtttacttcattaagggaatcatctggaagtgtgctgtgggaggcggctgaatctggattgccaattatcatgccaaatcaaaatgctgcttttcttttcaagaaatctgcacttcagtttagcatttcaagtaaaaataaggcaatcaatgagatatcaattttcttagagaaattaatagacgataataatgctagaaaagaatatggtcgattagcttattttaatgtaacggaaaagaatctatttaaagataaagtaaaaatagcaatcaatgattataagaatacaatttaacttttttaaaatatagtgttaactgatatggccttaaattgtatttattacaacaaataaatattttcgtttcattaaatgttattttaacttgtaaagtatctaagcttttatctcagctaaatataatttaataaatcatttaatttagcagtagtgaccagctatattttaagcgtaggacttattctggtttagttgttgcttgaacttattcaatacagtttatcggatagtctgtatttaacaagtgatctttaaatatatttcaaatgataacttactggaatcttaataggagggttggttgaatgcagtctaaatttaaaagagatcaattgtttttcttaacggggttagttttactgacaataaatgtctcctttattttgatggttaatagtaagctttttacttttatcaaagtaataactgcaattttatttatgatagctgcactattgaagcgctggccaatcaatgcaattattgaggtttttgttatatttggggtgatgcttatatcttactttcaaactaaaaatgtagatattttatatctatatttagctattgttgcctcaaagaatattgattttagattatctgtgaaatttgcaacaattactagagttattggctttatagggacaattctattatcttatttcggatttattagtagttttgttagttaccgagaagaagaggtacgctattcattaggttatcttcatcctaatatggcatccagtaattttttctttattatactgggtattatttttctccgctacaagaagattggtataattgcttacttttttatcatcttaagtttacttattatttctgatttaaccggtaatagaactgatctagttttaggtattctactgatagtgttgctagtatttcggcgtcacttatcgaatgttttattgattagaaattggtggctgctagcattcttcgtttctgtcagtatgtcatacatatataatattcatccaataggtatactacaaacaataaacgatctattaactggacgtttgtaccaagcaagtgattttattaatctgtataatcctaatctttttgggaataaacttaatctcatgagtacagttagttctgaatatgtaaatgcgattgggagtacgggaagagtttatatattagataatatgtatgtaaacttattacttcagcatggtgttctaattacagcttgggttttaataaatgttaggagactacttactttagagataactaaagttaatgaacatgttgaagcaaatattatctgtatatactttataatatttgctttatacgctgttactgaaaatacacctatatctatagattataatgtatttctaattatttttgctaataatattaataattggacaaagaaagaaggcaagatcgatgtttaaccaattgagaagggggctaatgtatacatttattggacaatacggaaacgtcttaatatctgttttagttaatgttattctctcacgtctgttgacaccacatcaatatggaataattgcagtaatcatggtatttattgttttctttcagttactttccgaaatgggattgggtccagcaataatacaaaataagtcattgtctaaaaatgatttatataatatttttagtttttctatcgttttagccatagtattagccgcaatatttgcattgtttggttttttactttcttatttctataatgatcatatttatattccactctcgttgatactttcgatagctgtttttttctattccttagtagttgttccttctgcaatcctaaaaaaacgtaaagcatttaaatatattaatattagcttagttgtttccgccttagcaggtggattattaggtgtttttttagctttcgaaggagcaggggcttactctttagttctaatggcaactttgactgccactagtaattttttcttacttttctttaaggcaaaacttaaatttaaattgacttcggattttagttccttaaaaaagattttttattttgctagaaatcaatttttatttaatatattaaattatttttctagaaatatggatacaattctcattccaaaatttatttcgagtacagcaataggaaattataataaagcataccaattgttaatgtaccctgcaaccatattaaacggagttattaatccagtacttcaacccgttttatctgactatcaagacgacgaggaactaatagatagtacttttttaaaacttattcattacttaattatgataggtatgcctatgtctgttttcttctcttttaacgctaaagaaatcattttttttgtgtttggtatgcagtggggaaaaagtgttataccatttagtttattatctacaacagtttggatacaaatagtacttgttagtactagtgcaatctttcaggtaaaaaataagacgaagtacttagtgctgagtggttggataaatgcgatattaatcacaattgctgtcttgataggtgtatcatttaaatcaatcaattatgtagctgcgtttatttcattttcttatgtggttagtttttgttctacaatctatattttgtataaaagagttatacaatgttcgctgaatcgaatcatacgaatatttatttcgccggttgtaattagtgtactgatgattgtagtattttttggggtaaaatatacaagaatattcggatttactaataattattttgttttattagttttagacggattagtttggatacttttattaatcataggtattttaataaccgaaggaagagattcaattgtcatagcatttaatttaatgctaaagagaaattagaaaaggataaaggtgtaaattaaattgaaaataacagtagcaggtacaggatatgttggattatcattagctgtattgttagctcagcataatgaggtaattgcacttgatgtgatttctgaaaagatcgacttaatcaatgataaaaaatcaccaattgtcgacgattatatctcaaagtacttagtagaaaaacctctagatttaacagccacactagattataaagctgctttagagaatgcagactatgtaattgtttctacgccaaccaactatgattctgaagaaaattacttcgatactactagtgttgatgatattttggagaaagtcactaaaattaaccctaatgcagttgtcattattaaatcaacgattccggttggttttactgaagaagctcgacagcgctttagtaacagcaatattatttttgcaccagaattcctacgtgaagggaaggcactttatgataatctctacccatcgcggattattgttggtgaagattctgaacgcggtcatgtgtttgcggggttgttgcaagaggctgctattgaagaaaatattccaactttatttgtatctagttcagaggccgaatcgattaaattattttctaacacctatttagcaatgcgtgttgcattctttaatgaattagatacatacgctgaagtccgtgggttagataccaagcagattattgacggtgtaggtttagatccacgaattggtgatcactataataatccttcatttggatatggtgggtactgtttaccaaaggacactaagcagttattggctaattatgaccatgttcctaataatttaattcaggctattgttgatgcaaatacaacacgtaaagattttatcgctaatcaggttttggctcataatcctaaaaaagtcggtatttatcgactgacaatgaaatctaattctgataattttcggcaatcatcgattcagggaatcatgaagcgaatcaaggctaaagggattgaagtaattgtatatgaaccaacattaaaggatgctacattctataattcagcagtagtgaatgacatagatactttcaaacgagaagcggatgtgattgtggctaatcgtaatgctgaagaattggcagatgtgcaagataaagtttatacacgcgatttatataatatggaatgattaatctttaaatgttcgtgttatgaatgtttatcaattgattatcattagttttaaattatataattaagtatgaaatcgttatcataagtatcagaagggagttattacccatgtttaagttagccttattaatactcatgttcagtttattaagcactcaatccatcgtaagcgcacaaaccgctaattcaacggttggcctcacaatcacggcaccgccaacagacgccgctattcaagtacagcggcgtcaacaacaagccgagcaccacgcggcctggctggcgctcgatttgcattcagacacgccggttgaagtggttgaaacgattaatggtcaaacaactcactattgggaatatccggatggcacgattagcgatacgccaccgaccactttccaccccatgcccgccaaccacaaaattggtcccactcacgaaagttatcaacaacttattagtcgattaacaccggtcaccgaagacgtactaacttttaatcaatttttaaattcataatattcaaatcaaaaaagctgattatcctgatagttcgggataatcagctttttcaacttgataggcaattgataacgtgcttctcagcttgctctaataacttccaaagacgtgggtcgtgaagctattgctccccgaggcccgaccgacgtaggattgaatcccttcaaccgaactaatcgaaatatccaacggaatattgcgcggtaaatacttatccgcagcggttgcaatgtactgtgtaaaactcataatttcggtttcactgtagaattgcgtattaattgtcacgttcaaaccggataagacgccttcttcataatgcgcttgcgccgtcaccccacttaagttcgggaagaacgtttgaatttgttctttaaaactggtgaacgcatcggcatcactttgattgaccgccttctcatcaccggtaattgggaaaacttgattttcttgattcattgaatgccaagaatcaatggtcgtgctgccatttttactgaccccgtacgcgaaataggtcccaccgactaaactatccttagtcgcttgtttgtaaagcccaatcacaatcgtggcctgactcatcccttttttctgacgcatccgggccaacactttattggccatctgtttaccctgttgttccatcatcgccgttgaaatcttggtttgataggtcgcaccatattgttctttggtataataatcaacttggttcatcccaagcccaatactcatcccagaaagcgtgccatcttggctcaaataatcttgttctaagatttgttggagatacaatggattccgtttagtcggttcagtctgcccgttatcttcaggattcaatccgaccgtattggtttttgatttacgcgctaaccatttttgagcttccgtcgtctttaaactttggccctcttgaaaaatatatttggacgttggaaattgttctttggataaggttaataaaccattttcaagactcttaacatcaaacgacgtgttgctttgttccgatgttaaccctcgtgtttggcttgttttatattggccattcgtgatgacaccttcgtacatgctgtcagtcaccttaccggttgtttgtaactttttagtggatttactagatgtgtctgatgacgaactgctttgaatgctcgtacaacccgctaataatagcaatgctgccgttgcaacgacccataatttatattttgccactgaaaatggtgcctccttagttctaattgcttcttattatacccaatttagatcgattaagccaaataacctgctaattcagcttctgtgatgatcggaatcgataacgcttcagctttcgccaatttgctacccgcgtcagccccaacaatcagaaaatcagttttcttggaaaccgaaccggtcactttggccccgttagcttccaattgttgtttcaaatcatcgcgcgtatactgcgtcaatttacccgttagtacaacggtccgaccgttaaagaagctatcactatcgctagcctgctcttgggttacgccggtgtaagttaaattaacgccaaccgctacgagttcctgcatcaacgtctgcacttggctatcagctaagtaagtcactaaactgtcagcaataatcaagccaatcgtatcaacttcgatcatctcgtcagccgtcgcagtcattagcgcgtccatcgttttgaaatgttccgctaataagcgtgcagccttggcaccgacgtgtcggacccctaacccaaataataacctttctaacgagttctgacgactagcatcaatcgcttttaataaattattaatagatttttctttaaaattatcaagttgcgctaaatcagtcgccgttaatcggtacaaatccgcgacatctttcactaattgctgttcccacaactgttcgataatccgggggcctaacccgtcgatgttcatcgcattgcgcgatgcaaaatgggttaactgttcctgaacttgcgctggacacatcggattaatacaccgtaaggccacttcttcatccagatggactaattcatgctgacaagacggacaatgcgttggcgcttgataaggttcactatttgcgggtcgttttgccaagacgacttgtgaaatttccggaataatatcgccggctttatgcaacaagaccgtatcgaacaaacgaacatctttggcggcaattaaatccgcattatgcaaggaagctcgcgcaaccgtagtgcccgctaattgaacgggatccataacagcggtcggggtcacaaccccggtccgtccaatcgtccattcgatttcgcggacgaccgttgccgcttcttctggcggaaatttataagcaatttcccagcgtggaattttaaccgtattgcctaattgccgttgcagtgccaaatcgttaacctttaagacaatcccgtcaattccgtaggctaagtcatcccgcgtcgtttggtaccggtcaatgaacgcttgaacctcggtcatatcctgacaaacggtcgcggtcggattaacgttaaagccgagttcagctaagaccgtcaaggcctgtgcttgggtcgtcgcctgaacgtcatcaaacgtcacaattgtgtacataaacgcacttagatttcgggattctgccactttggcatctagctggcgtaaactgccggccgccgcgttccgtggattggcaaacggtgctaggccgtcagcttctcgttgttgattcaaatccgcaaaagaagccttaggcataaaacattcgccgcgcacttcaattgaaaccggtttggttaacgtcatcggaatggctttgatggtttttaaattctgcgtaatatcttcgccaatcgttccgttgcctcgcgtagccccgcgtacaaattgaccttggtcataaatcaaatcaattgccaggccatcaatcttgagctccacattgtattcaatcgcttgtgccgtattttttcgtaaccgatcatcaaacgctgcgagttcttcgggtgaaaaaacatcacccatcgacaacatcggcaccgtatgggtgactttcttaaaccccggtaacacttccccaccgactttttgggtcggtgaatcattggtgacgattgcgggaaagaccgcctccaattgttctaaatcttggtaggcttcatcgtagacgtgatcttcaaccactggtgcgtcttttgtatagtaagcgtcactataagtggccagcgattgccgtaatgcttgcgcagcgattgccgcttcttcttgtgtatattgatcaattgatttggctaatcccatctcggtcctcctaccgttaatcggtgactttttcaattggcgcaaagctagcaagtagtcgtttaacgccttgttctttaaacgcaatatcgagttcttggtcattgcctgagccgttgactttcacaacggtgccaatgccccattttttatgttgcactttttgacccgcttgccagctaccactattatcgccaccagttgtatcggcaatcttatgactcgtcgtggcttggccttgaccataagtggtcgccgttgcccgggcataactattctgacgaccaaacggtactttacgttcgggaatactaccagcgtttccgttggcgtaatccaataatttatcatcaatttcgccgataaaacgcgacgcttggttactttgttgacgtccatataacattcgtgaataagcattggttagatataacttactttcggcccgcgtaatgccgacataggccaatcgtcgctcttcttcgagttcgtcttcttccattaacgctcgtgataatgggaaaatgccttcttcaagccccatcaaaaagacaaccggaaattcaagtcccttagccgcatgtaaggtcatcatcgtgacttcactggcttcttcttcaacggaatctaaatccgacaccaatgataattcggccaagaaatccacaaataaatcactatcatcttcttcgggttcgtaatgtgcgtcaaactgggtcgtcactgataataattcttcaatattttcaagacgactttgtgattcgagcgtattttcgatttctaacgcttttttataacctgttttagccaataattcttcagttaactgggtaacgtttaagaattcgcgcatcttagttaaatcaccaatcacgttgccaaaatcaattaaggtcttgcgactcttagctggaattgttgataattcagcgttttgggccgcttctaaaagtgaccattgatgatcttctgcaaattgattgagtttttctaatgttccggggccaatcccacgtttaggactgttgaccacccgttcaaaactcatcgaatcggatgcattaacgactaatcgtaaataagccaaaatatctttaatttctttacgatcgtagaatttatggccgccgaccattttatacggcatgttagctttgacgaaggattcttcaatcacccgtgattgagcgttggttcggtataacacggcaaaatcaccaaagtggcgatgattggtcgttatttcttcttgaatcttggtgatgacaaatagggattcatcccgttcactttgaccacggtaatacgtgatcaactcgccatcttgattatccgtccacaactctttgggcttacggtattgattatgattaatcaccccgttagcagcttccaaaatggttttcgttgaacggtaattttgttccaacatcactgatttagcggctggataatcatgttcgaaattcatgatattatccatattagcgccccgccaaccgtagatactttgatcggcatccccaacgacacacagattttgatacttttcagccaacatattaactaacgtatattgggcttcattggtatcttggtattcatcaacgtgaatgtattgaaatttatcttgataataaactaaggtttctttattttctttaaataaccggattgtttgcatgattaaatcatcaaaatctaacgcttgattttgatggagtcgtttttgatattcggcataacattgcgccacaattttttcaaaaggactgttggctaacccgacgtaatcggccggcgtttgtaattcatttttagcgttactaatcgtccctaaaatcgctttaggttcgaacttcttcgtatcgatgtttaaatctcgacaaacgtgtttcatcaacgttaattgttcggacggatcggcaatcgtgaacgcgcgattataaccgatctgttcaatttcacgtcgtagaatccggacgcataaagcatggaaggtcgagacccaaacatcttgaccattatcgcccaataaagcacaaacccgttcacgcatttcacgcgccgctttattggtaaacgtaatcgctagaatgcgccaaggtaagacgtgtttttcttcaattaaataagccacgcggtgggttaaaacccgcgtcttgccactaccggcaccggccataattaataaggggccttccgttgctaaaaccgcttcagcttgcttatcgttcattccttttaacaattcttgttcagacaaaatcttcatccttccgtaaatgcaatcagcctatagtataccaaattagctaactagaaaaaagcgaacagcaatcactaaaatagaaattgaatgcgccaattttatcgcttgacctgggacgcgtttcataaattatactcagtttatcaacagaaaggtggatatcatgatgattaaatatattgtttccgatttagatggcacactcttggatcaagctgggcaactttccgaaaaaaatagttcggcgttaacaaaaaccgaattgccggtaaccttggtctctgcccgtgcaccgcaaacgatgatgccgagcattcaacaattagcgttaactggtccacagattgcctttaatggtggcgtcattttcaaagcgagtggtgatttcccactgattctggctgaacatccgctaaaacgtcgcactgcacaacaattagtcgccgcacttcaatctgaattcccagaaatcagtctgagcggctatgatttacagaattggtacgttcaaggcatcgatgaccaagtgaccgcagaagcaaccttaacgcatcaatcgccacgtttaatgaatctgtcacaattattaaccaatccagttttgaaactcttcaaattagtcgttgcgagcgatgatcccgaacgactcgcgcaaattaatacctttattaacgatttggcgttaactgatattgcagtccaacaatcacaaacacaatcactcgaaataaccgccgactgtgccactaaagagcaggcactcgcgacgattctagacgccgaacaattaaccgcagaacaagtcgctgcttttggcgatggccccaacgatcaagcgatgttacagtcggttgcccacccaattgcgatgcaaaatgccgtcgaatcggtccaagccattagtcaattcgttaccaaatcgaatgtgcacgatggcgttagttatggtataaagaaatatatcaccaaatttaatcgaaaagtaggttaaaaccatgccaaccattcgcgatattgcgcgtcaaagtggctattcagtttccaccgtttcacgcgttttaaatcatcagaaatacgtttcaaaaccagcacaacaagccgttgaaaaagtgattaaagcacttgattacgtgcccaacagcttagcgcgggatttaagtttcgggcaaaataaaaatatcggggtcgttttaccacacaacgaccatccgtatttcaatcaactgttaaacgggattatggacgccgcctttacgagtggttaccacatcgttttactcccgtccgaatataatcaaactgttgaattagattatctagaacaactcaaacgcaaaaatttctccgcactcattttcacctctcacggtctgccccttatcagtcttggcgcaatacgcccagtacggtcaaattgtctgctgtgaagacaccggcgactatcatctgtcagccgtttattctaatcgcgaaccagcctacttagccgcctttaaacacttggcgactttaaaggtccgacaaattgcgattttattgagtcgtaatttagaacaaagtccgaccagttcagcgattatggcggcttatcaacaggttttccaccataaaccggcagaaaaattagtgattggtgggatgactagttttaacgatggttatcaagccgctaaaacgttgcatgcacggcaatccgacatcgattgtttctttaccaacggtgatgacattgcgaccggcgtgcgtcaatattatctcgatcaagatttaacctcgccgctactattcggtcaagaaaaccagctctccagtttcttattacaatttccaacgattgaccaccatttcttcaccgtcagtcaaaaagcatttgaagtggctttgagtactgaacaccaaaaatttagtttcgaatcggaactgattgtgcctaaatgacataacaagctgtgacaaaactcggttgtcaattgagtatcaagttaaaaatgcggcctatccagaacttaggatagaccgcattttaaatttgaacggaaattgatgagttatggcaccgtcaaagcataaatcgttcgaatcagcactcttaatcaaaacgtgcttctgaactagcttcttccgtctagctacgattagcaaactatgaccaaattccggtcataattcactaatctaggctatactcagaagctgaccagttcagtcagcactcttaatctaaaacgtgcttctacttacaagttcctgtgcttagctacgtttcgcaaacgaagtccacaaccgggacttcattcacggaactaggctaatgctcggaactaaccgtaagtatcagcactcttttctgaaacgcgtttttacttacagcttcctgtgcttagttacgttaggtaaacaaagtctataacccagactttattcacctaactagactaatgctcagaagcacccgtaagtaaaatcgctcttaatctaaacgtgcttctcaagtaaccttttccggttaactacaaaataggcatcatgagtaaaaaacactcataatgcctatttttaggttaatcctcaaagcctaaccgacttgagtcagcactcttaatcaaatactctttcaaatatttctgctattctttgtaggtgccagtggtagtcgaaggcgtcgtctaggtcagtttgggttagttggcttgtgacctttggatcggcttctaataattggcggaaatccttttgctcatcccacgctaatgcggttttgggttgcaccaaatcgtaggccgcttcacggcttaaaccggaatcaaccagcttcaataaaacgcgttggctgtaaattaaaccgtgcgttaggttcatatcggctttcattttttcaggaaaaactgttaacgtatcaataattttcgtaaaacgttgtaaaatataatccaataaaatcgtcgtatcgggtaggataattcgttcggctgaactgtgtgagatatcccgttcgtgccatagcgagacgtcttccatcccggtaatcatgtgtccgcgaatgacacgggctaagccactgacgttttcagaaccgattggattccgtttatggggcattgctgaggagcctttttgacccttcgcgaaaaattcttcgacttcacggacttcggtgcgttgtagatggcgaatttcggttgcaaaatgttcaatcgaagtcgccacgaccgccattgcattgatgtagtccgcatgtaaatcacgcggtaaaacttgggtcgatacatcttgcgcccgaatgcctaattgattagtcacgtaagcttcaatctcggttggaatattcgcaaaggtgccaaccgcgccactcatcttaccagcttcaacaccttgggccgcccgttcaaagcgatcttgattgcgtttcatttcagcataccaagtcgccatttttaaaccaaacgttgttggttcagcatggaccccgtgcgtccgcccaatcatgaccgtattctggtattcataagctttctgttttaaaacggccatcaatttttcaatgtccgctcgaattaaatcatttgcttgtttcaagatatacccttgggccgtatcgaccacgtcagttgaggttagaccatagtgaacccattttttctcagcaccaagtgattcagaaacggcgcgggtgaacgccaccacatcatggtgggtgatcttttctaatcgattaatttcgtcgacgtcaaattgtgcattagcacgaatcttcgtcgcatcttcgactggaatatcaccgagttgcgcccaagcttctaccgctaaaatttcaacttctagccaagcttgatagcgattttcagtggtccaaatcgcacccatctctgggcgagtatagcgttctaacatattaattcctccaaaaattacacttaagcgtgatataaatcagcagcttctaatttttccaacaaaggattgacggctgccccaatagcggtcaggcttccaaattgttggcgatcttgtagatgatacaaattaaaataccaatctggtttaattttcatctgcgtcttcactagcgacaagctcgcttcttgaatgttcaacgtcacaccagcgttattcaaccgcgcttcaccaagcgctaattggcaaattgcctttaaatggtattcatactgtgaaaaattcaacgtgcgttccaaaacgttgcccgaaatatgcggcgttggtaccagccgtttaacgtaaatattcatatctggtgttaaaaaaaattcaatcccaaagaccccaacgtaatccaatttctgaccgattagattcgccaaccgattgatttcagccgcaacggtctgatcaatccgtgccggcacgattgataatcgtaattgatgatcttggtaatcattttcaacaatcggcaagacagtcaaatcaccttgcacgtctttagcaaccatcacggataattcctgcgcatcaggaatccaagattctaatagataggaacctagttgtaagaaatccgtcaattgatctaaatctgccggttccttaataaagcgttggtattgtttaccaaagcccttttggatcggttttaaaatacaaggataaccaattgaatcgatgccttgttgaatatcttcgacatccaccaccgtagttgatggggggatgttaatgtttaaatcatctaagaaaacccgttccaaataacggtcctgagtgacggataacacactgctgccttgcggtaaataatagttttgtgcaagttgttccaacaatgtttcatctaataattcgtctgtataagttaagacttggcaaatatcacctaaccgcgctaagtctgcatattggtttggatcaccttcaacttgtgcatctaaaatgctagcaagcggtgtctcttgaatctgagcgttgacgatcatcgccactttatagcccatttttttagccgcgagtgctagtaaaaaagctcgttggtcatttccgataattccgatcatctgtcctggataaataactggcatctgtttccctgctttcttatccgactaatcatggataactaattactctttattataaccaacttaacccctatctgcacaatactttgccattgttaagctttttttagcaaaaaaaagaagcctttcagcttctaaacgtgcttttgagttgcaacaacttccgcttaaccaaaaattccccaattatcttaaaatcaagataactggggaatttctctgttaatgctcggttgctgcccgcaactcaacgcacttatttattttaacgtgcttctacacacaggctcttgtgcttagctacgcttcataaacaaagtctaaaacccagacttcatttacgaagctaggctaatgctcagaacctaccgtgtgcatcagcactcacttatttatcttcaacaaaaacgacttcgccattttcaaaagcagcaatccgcgctaatgattcgacgtggattccgcgagcgtctaataattcgcgccctttttggaatgtcttttcaatcacaatcccaacgccttcaagttgtgcattggcttgctcaataatttctagtaaaccttcaaccgcttgtccattggctaagaaatcgtcaatcactagcacacggtcgttttcatcaataaatttcttagaaatcgaaatgtgattattgactttcttagtgtatgaataaacggttgcgctgtacatattatcttgtaacgttaaactcttgtgctttctagcaaaaacaacgggaacgtgaaatgcaagaccagtaaggactgcaggggcaatcccagatgattcaacggttaaaatcttagtgatgtgagcatctttgaataatcgatagaattcttcacccatcgctgccatcaaatcagggtcaacttgatgattcaaaaaattatcaacctttaaaacatcttcgcctaatacttgaccatcttttttaattcgttcctctaataattgcacacaaagcactcccttagtcttattttcatgctattttctgaaatagaattaaaaataggttaccataaaaaaaagcacgcaacaagctaaattatgcgatttagccgattgtcatgcactttttaatgattattgatcatattgatttaattgataggttttaacaatttcaatcaactttgccggatagtccggatccgtcgcgtaaccgtcctgctttaacgcgttagcggcttgctgataatccgtcgccgcaatcacgtgttggtactgattcggattccacgtcgtccctttggcgaacagcaacacgtggtccaacatcgatgcctgataatcgtcgtagactctaaaccgcgcggtcgtcgtaatccattgaccgtttaaatactctttagtcgtcatctctttggtgttggccgggtcatcccccttaattccaaagtaattatgataatcggccgctaacgtacttttaccccaatcactttccaaaatggcctgggctagcgtgatacttggtaacacgtgatagtcggtttgtaatttctgcgcgtaaggcaccattttcttaataaactgctgtttttgattggctttagagagttgttcttgcttcgcttctttttctaagcgggcttgcatctgctcaccgtggtattgaaccaataaaacgagtccgacaccaattgtaaaaagggccaccaaaacaaccactaaccaatctgttggttgtcgttttttggattgataggatttactggttcggcgctttttcttcggtgtttttctttttttagttgccaataatctgcctcatttgaattcaatctattcacccattgtacacaaaaaataacagataaccaacgatttgcataaacaacattaattcctattcaatcacattcttgctataatatggcatgtattcgatttcaatataaaggactgattaattttgacaacactcaactggggtatcatgggcctgggcaacatcgccggcagtttcgccacctatttcgatcaacctgatggtcaagtttacggggccgcttcacggtcactcgagaaagcgaccgcatttaccactaaatacggtattccgcacgcttatggtagttatgccgaaatgttagccgatcccgccatcgatatcatctacatcgcgacaccgcataattttcattttgaagggattatggccagtttaaacgccggcaaacacgtctttagtgagaaggcgattaccatgaaccgccacgaattagcagccgctaaggcgcttgccactgaaaaaaatttggtgttggccgaagcgatgaccatttatcacatgccactttttgataaaattgaagcccaacaaaaagcccgccagttaggcgctttaaaatcaattcaagtcgcctttggtagctataaagaacttgacccaacgaaccgtttcttcaatccagctctcgctggcggcgccatgttagacattggggtttacgccttagcctttgcccgccggatgttgacggccaaacctgaattaatcgcgacccaatgggtacccgctgaatcgggcgtcgatcaacaatcgaccttattattaaataacgcacacgatgaaatggtgacagttactttaaatttacacgctaagatgccaaaacaaggcgtgctcgtttacgaaaatggctacgtcacagtcaatgactatccccgccctgatcaagcaacgctaaccttaccagatggccagacagaaacgattcaagctggtgatgccactaacgccatgaattacgaagtccacgacttccaagaaaccgttcgtggtcatcaacctaatcacacccttgaactcacaagtgatgtgatggacatcatgactgatgcccgcgcacaatgggggtttgtctatccgttcgaaaagcccgaagatttgaaataacacagaccatattaataggcgtttgatttcaaaaacgaaatcaaacgcctattttttatagcataacccgaccatcgttatcagagcgatgattattactgtctagtccgttgacatgctaagtttcagattagtgccttggtcaagaccaacatctcttgtaattgaatcccattttcaacgattggcgtttgatattgatcaaagaaatggggccgaatgtcactaaagcggaagccctgatgcatgtaaaatgcaatggcttcaaagctagcatccccagtaccaaccactaattgctgataattctgattactgagttgttcggttagtagttcaattgcttgccgaccataaccgtggcgccgatattctggtaaaatgcccagatttttaatttcaatccggttagccccagccggtacataatgtaatgcgccaacggtttgaccgttatcttgcaacaaccacaattgcccgtagcttaaataacgttggaccatcgcttcttccgcatcgccaatcaataaataagccatcaatgcatggcgcttttggaccgcaattttttgataagttaacatgttcatgcctactttctaatccacaaaaaaagcgactgttcccagccgctttggttaatttaatatattaaagtttgttaacgttaacagcttgtgggccgcgatcgctttcttcgatatcgaaagaaacgctttgaccttcttcaagcgtcttgtaaccgtcgccttggatagctgagaaatgtacgaatacatcactaccatcttcgcgagttacaaagccataacctttttctgcgttaaaccattttacagttccgttttccatgagaaaaatcctccttgtgtcgtaatgacacgtatatatttgtgtatttctgtcggtacaatggaagaaagttcttttgaaaactatcgaaccataacctttcaaaaagtacaaacatagtgtaacacagaaaaaaaacattaacaagcacttggattgaaaaaataaaacgttttctattcagttttatcaaaccatttcaatttaatgtctcgcaatatttcggtttttaactaataggaaatcatttggcattttcgcctttttacgctaagatagaaacatatcctcaaaccattggagtgcattaatcatgttaaaaaaattaaaacgattcctgcccgttctagcgctggtcttcctcttagcgagttgcgatcaaccgctcaataccaaacaacaagtcagagaagatcttaaatcactccaacaaatttcggctacccaacaaacggcgctaacggcgcttgaatcggccggtcagagtgaatcggtcacctatcttaaaatccaagaacaatatcccgacaaaaacctattagaagtgtcgacgaccaaaatggcccaagcaacggccaaacgagctgacgcttatcagaccttgaaagaccaacaaaaagcgctcaaaccagttgcacaacgtttattgaaagtcgccaaacaagacaacgctgatttaccgactgaagccattaaagatttaaatcaaagcattaagatttcaacactcgattacacgaccctttctaatttttatcaagcggctgttactgcagaagctgatttctatgccgaccatcaagatgccgatgcagacccaaccgatttagaatctccgattaatcgtttgaatcagttttatagctcagtttaccaacaagccgaaatcgctaaagtcaatatcaacaccgtgacggcgcaactcaagaaagtgcaaacgggcttaaagtaaagcaacgcatgaaaaccaccaaaactaattggcgattttcatgcgtttttatcgcccgctaatcttagcgtactattttgagtgacaaagcccaacttttggtagagttttgtcgcagcttgattgttccccaacgttgtcaattccagataagcaagctgttgcacttgctgccatgcctgagccgcttgaatcaactgactagccgtcccattccgccgtgttttgggttgcacaaagatagcggtcaaatacgcaaaataatgtggcataaacaacgctgaatcagtggtccgcgccgttgtcacatggcagaacccaactatttgttgatcacttagtcgttgcacatacaccgcttgattggggtcggtcagcattttctcccattcaaaaaaatcgggactatagttggcttgataagtggttggttgtaattgatgcatctcagtcgttaactgttgatactgacgcgttaatgccgcgatatcggttaaagtcgctaattcaatcatcttgaatcctcctggttattaaataacaattgacttcaaaacaaaattctcttatactaatgtacgtggcattaagtcataatgcaagtatcgcgggtgtggcggaatggcagacgcgcaagattaaggatcttgtcgggagttttcccggtggaagttcgagtcttctcacccgcatttatttttaaccggaacgaggtctttaggacctcgtttttttgtgcgcttaaagcgattgattgaatctaaaccgggaaatggctataatatcagtaaatcaacaggagaggaatatcccatgactcataaaaattcatccgcctatcgtattagtattctagcgattttaacggcgttactattagttcaaagtttcgtaccaatggttggctatatcaacatcatccccggattaccggcagtcacgaccgtccacttaaccgtcattcttggtgctgtcattcttggcacacgtggcggttcaacgctggggttaatctgggggattctatccctcatccaagcttacaccgcaccaggcgatccgttgtccttactgatttttcaaaatccgatcatcgcgattttaccccgggtcttagtcggcaccgttgcgggatttacttttgaacacctacaacattctcgaattaccaaacccggcgcaatggctttggccggtgtcttaggcgccttggtgaatacgacgttagttattttgctaacgtgggttttctacagccatcaagcatctggcatgtaccataccgatcctagccgtttaatcatcgtgatgttagcggcggttgccgttaatgccatcatggaagcaatccttgcaggcattgtcaccccattaattggcacaccactcatgcggtttagacgtcaataagtaattaaatagcaagctgtgacagaactcggttatcaattgagtatcaagttgaaaaggctggttatcccgaactaaggataaccagcctttttgatttgaacggaaattgatgagttctggcgcgcgtcaataaataatgttcgtttaaatatcagagtatgacgacttgtgtcacaacctcatttttatgcgttaatttcagtcttgagatgcactaatcggccacgacacaatcgacagacataccggtcaacattaatttgacgttgtcgttgatagacctgaccgcaactttgacaacgatacgtttcaatcttacgggttttaactttttttaaactggccggtgcatatcgtgcaccaccaacttgttgcaacaattgtttaaaagcaacatctcgatgacgataaccttgatgacctaaatgcaaatgataatgacacaactcgtgtttaatcacaccgaccaaagttgcctgatcatgttccgttaacatcttgggattgatatcaatatgatggtcgctcagatgataccggccccccgtcgtctttagtcgtcggttaaaattagcctggtgctcaaaaggctgctgaaatacagtcagtgagatagtctgaatcaattgcgtcagttcttgatccgtcatcttagtcgttggctttaggggccttcatggttaattgcacccgttcccgttcttgatcaacactcagcacccagacttggacaatatcgccgaccgcgacttcatcagaggggtgtttcacaaaatgattggccaattgtgaaatgtggactaacccatcgtgtttaacaccgatatctacaaacgcgccgaaatcaatcacgttgcggacagtcccttccaaggccatatttggtttcaaatcagccatcgtcaaaacgtcttggcgtaacaaaggggccgtcatttgatcccgtaaatctcgacccggtttctgcaaaccgtctaagacatcttgtaaggtttcagcaccgagttctaaatcggccatcaatgtttcaaacgactgttgttgaatcgcttgttgtagttccggtgtacctaaggccaccaaagttaacttgacagtttttagaatggctttagccgcaacgtaactttcaggatgaatatcggtgttatcaagtggattcgtgccgttgataatccgtaaaaaaccaatcgcttgttcataagctttgggccctaatcgtggcaccttcttcaagtcactgcgtttttgatataacccattatcatcacgatactgcacaatattttgcgccgtcgtgccggttaaacctgaaattttctgtaataattgtggactggccgtattgacgttaacgccgacactattaacgacatcctcaatcacggtatccaattgcgccgttaattctttttgcgccacatcgtgttggtattggcccacgccaactgcttgtggatcaatcttaatcaattctgccaatggatcctgtagacggcgggcaatactaatcgcactccgttcttcgacgtgtagctcaggaaattcagcacgcgccgtatcgctcgccgaatatactgaggctcccgcttcattgacaattacgtaaaaaatttcctgggaaattgtttttaaaatatccgcgacaaattcttcagattcccgactagcggttccgttaccaattgcaatcatttcaacgtggtatttgagtagaaaatttttaaattcatcagtggcagctgcccgttgtttggccgaagccggtttatgcggatagataaccaacttgtctaagaacttacccgtgccatcaaccacggctagtttacagcccgtccgataagccggatcaaagcctaacacgactttgccctttaatggcggttgtaataataaatgctttaaattatcgccgaaaacagcaatcgcttgttggtcagccttggtttttaattgtttccgtaattcacggtcaatcgccggtccaataaagcgtttataggcgtcgtcaatcgccatttgaatcaacgccgtactagcggtttgttgccccctgaataacgcttgggcaatatgccccgtaatcatcgcattgttaatttgaattttaactttcagaataccctcgcgttcgccacgcgcaatcgctaagtattgatgatcagcgactttagccaagggcgccgtaaagtcataatagatttgataaacctgtttgtcatctttttcgtcatctttagattggctaactaattcgccattacgccaagtgtattgacgtgtccattctctaaaagtagcaacttcactgattttttcggctagaatttcatgaacacccgctaaaacggccgtttggtccgttaaatcctgttcaggattaataaattcagccgccttggcttgcaacgtcgcttccgaccaattaggtattttttcaatcgcgtcggctaacggttctaaaccagcttccttggcaatcgtggctttcgttcggcgtttttgtttatacggtaagtacaaatcttccaaaacttgcagttgtttagctgtttcgatttgtttttgtaattgtggcgttaatttctgttgttccgtgatatttttaataatatcagctcgacgtttttctaacgtcgttaaatagtcaaacgtactttcgatttcacgaatttgaacttcgtctaaactccccgttcgttccttccgataacgcgccacaaaggggacggtgttgccttcggcgagcaatcctaaagtggctttaatttgtttcggttggtattgcgttaattgggcagttactaattgttgaatgtcagtcatactcgttatctcctcatcattttgatgcaatcaaaaaaacagcttccacgctggaaactgttctcatctactttaagcgagcgttgaaattttttcaatatatttagaaaattgatcagtcgctgcatcttgacgcatttctgacgccacaaaagcctgcatgtcgattgtttgatcatcgtgcatacttgtaatcaaatcttcgcaagcttgaatgaagtcgctataagcgcccattaagcgttgattattccccatcaagcgagcaggaacggcaacggtcttaaacttagccaatgcttcgtgatattgatcaacgccatcgcggaaaatttgagcagttgtttgataatcttgttcgctcatttcagccaatttaccatttgataaagcttctttcaaaggtgcgaaatacttactcatgccttcttgggctttttcagttgtatcgattaaatcgttaacggcttgaccgtagtgcgccatcttttgttgtgttttattcatgttaatcctcctaatatcctatgctttagtatactaattctaataacggcttgcaattaaaagtttgaaatcgaccgatgcgttctgcatccaaaaaagccaaccatagttaaattcaccatgattgacccatttttgatgaaaaacgtgcttctcgaactagccttttccggttaactacaaagcagcaatcatgggtaaaaccgcccataattgtcgcttttaggttaatcctcaaagcctgatcagttcgacccagcactctttcttaaacgtgcctccactcgcaaatccctgtgcttagcgacgttgcatcaacaaagcccaaaactcgggctttattgatgcaactaggctaatgctcgaaatttacccgtgagctgcggcactctttctttggaagaatttcactatttctacgatgacgattaataagaatgaagcggcgatgacaatgccccattgatataaatctaaatgtgaaacgtggaataagccgtttagacccggtaccataatcgttgctgccaataggacaaatgatgctaggacagcccagttaaatgatttatttctgaataacccgaccgtaaagattgattggtggactgatttaacgttaaacgcgtggaagagttgaatcaaccctaacgttgcatacgccatcgtcaaggcatccgcatgtgctaaaccacttgcttgatgcacaggataggtgattgctaacgcataaaccgctaacgtaatcccaccttctaataatccttgatagataatcgcttggaaaacgccacccgagaagaagtttgatttacgaccacgtggtttttgatccataataccgggttcagtcggttcaactcccaaggcaatcgctgggaacgtatctgtgactagattaatccacaagatatgcactggttgtaaaatctgccaacctaatatggtcatcataaacaaggttaaaacttcacccaagtttgctgataagagatattgaattgatttttggatattggcaaagacttttcggccttctttaaccgcaacgacaatcgttgagaaattatcatccgctaagaccatatcactggcccctttagacacttcagtccccgtaatccccataccaatcccgatatccgctgatttcaaggccggcgcatcattgacaccatcaccggtcatggcaaccactttaccgtgtttctgccaagctttcacgatccggaccttatgttctggtgcgacccgtgcataaaccgcgtattgttcaacttgatcagcaaattgttgatcatctaattgatccaattcagcacccgtaatcacggcagcatcagcgtgttcatcgtctttaatgattcctaaacgaagcgcaatcgcttcagctgtatcgcggtgatcaccagtaatcattaaagtccgaatcccggctgaatgcgcatcagtaacggcttgtttggcttctggccgttcaggatcaatcatcccgactaacccggcaaagactaacgattcttctaaactttcatcaaccgttgttggtttttcaggcaaaattcggtaagctaacgccaaaacccgtaaggcttgtttggccaggttgtggttggtttgtaataagaagtctttttcagtttcatcaaagacttggatttcgccattttgatcgatataatgactaactcgtttgaataattcatcgggtgcgcccttggtcgtcattaagaattgaccatcggcttgttgatgaatagtcgacattaatttccgttctgaatcaaacggtacttcagccactcgtggcaagtccgttaaagtttgttgtagattaaagtctttcaattgaccgtaagccactaacgccgtttcagtcgggtcgccaatcatttggccttcttcagtaatcttggtgtcgttggctaaattcataatcttcaacgttaaattatcagctggcaatgcagccgatgcatcttgtaattgattattggtaaagattttttcgacagtcatttggttcatggttaatgtcccggttttatcagacgcgataatatcggtactgcctaacgtttcaaccgctggtagcttacggacaagtgccttccgtttcaccattttttgcgttcctaaagctaaaataatcgtgacaattgctggcaagccttctgggattgccgcaaccgctaacgaaatcgccgttaataacatattaattggtgattgcgcgtggcgtagataaccgaccacgaagacaatcgctgcaataattaaaatcatgatcgttaaggttttacctaattgactcaagttcatttgtaacggtgtcgttgtttcatccgcttggtttaacatgcccgcaatccgaccaacttcggtttgcattccaattgcagtgacaacgcctagtccacggccgtaagtgacgttactattcataaacgccatattcgtccggtcgccaataccactttcagcatcggtcaacacgccgatttgtttgtcgacaggtaccgattcaccggttaaggccgattcttcaatctttaaggccgctgattcaatcaaccgtaaatcagcaggaacaatatcgccagcttctaataaaacgatatcgccaacgactaaatcttcactcttaattttaacaatctgaccgttccgacgcacgtgtgcatcgggggttgccatttcctttagggcatcgattgcctgttccgctttggcttcttggaaaacgccaaaaaccgcatttagaatcaccacggctaaaataataaacgcatccggccattcatgtgctaagaatccagcaatcagcgctgcgaccaataaaacaataatcatgaagtctttaaattgttctaagaaacgaatcactaagccttttcgtttcttttcggttaactgattcttaccattttgttctaaccgagtcgcaacttgtgtcgtgcttaacccttcagaactcgtctccaaagccgttaaggtctgctccggtgattgtgtaaagtattgtgtttccgtcatgtattacgcctcctattataaactcaggggtaaaaaaagagacttacaggaattcaaagaattcccataagtctcactaattaagataacaccagaatattgtcttgttggtggcgttatcgcagctaggctgccagttactcccttatcgttaatcctattataaggcataaccaattcaaaacgcaagtaatttgttataaaaagattgcaaacttgagcgatattaacgatgaacgtgtgctcactttaaacgtgccttggttcgcagacttctgcgcctagctacgtttcgcaaacaaagtctttccaaggctttgtttgcgaaactaggctaatgctcaaagtctattcgcgagccgcggcactcttctataacgcgctttttagttgcaacaacctccgcttaacctaaaatcgccaattatcttaagttcaagataatcagcggttttctgttaatgctcagttgctaaacgcaactaaacacgcttacttcctctaaacgtgcttctcgaactagtcttttccggttaactacaaatcacggcttatgactaaaaagcaagtcataagccgtgattttaggctatactcagaagctaaccggtttaatcagcactcttccagaatgtgtcaaataccgttattggtaaatgacgtttgtgttctgttttttggtaccaattttcaattttttcggccgccgtctctgaaacttctcggccttctaaatagtcatcaatttcttgataagtcacacctaacgctaattcatccggtagcgctggccggtcttcttctaagtcggcagtcggcactttctcgtataaatgcgtcggtgcacctaattctgctaataatgcttggccttgacgtttatctaaccggaaaaggggcgccaaatcagcgccaccatcgccaaatttcgtgtaaaaaccggtgattgattcagcagaatgatcggtgcctaaaacaactccctgattttcaccggcaatcccgtattgtgcaatcatccgcacgcgcgctttgatattgcctttattgaaatcactcacggtcacaccggtttcagctaaagcagccaccatcgtatcaaccgatgttttaatattgacccgcttcgtttggtccgcttgcataaagtcaatcgccgccatcgcgtctgattcatcagcttgttccccatagggtaagcgaacggcgataaattgataagcttgattgcccgtttcagtccgcatttcttgcattgctttttcagccaacgcgccaaccaaagttgaatcttggccccctgaaattcccaacacatacgtttttaaaaacgtgttttggtataaataatcctttaaaaaatcgactgaacgccgaatttcaactgccggatcaatcgttggttgtgtttttaaggctgcaataatctcagtttgtaatggtcgcatcttcattctcctttagactaactaacatcagtctattacgcttcaatcttttaaaaatgtaagttctgaacatcttcacgaacttgacgaattaaattcatcttatgatcccaagcccgttgtgataaatcaactgggtaatcttgtgggttcaaatttcgtttgtattcatcccatagcgaattcaaattctcggtacagaattttttgatggcattgatttcaggcaatgtataaacacgttggccccgatcaaaaatcgtccgtagaataggccgcgcatcaaaatctgtcactgttttgttaatgtacgtatagttggggtggaacatgtaaatcgactcttgttccaacggatcttcatcccacaacgtgatataatcgccttctgatttatgatcgacctgtttggtaattcgccaaacttgcttacgcccaggcgtcgacactttttcagcgttgctcgataatttaatcgtatcttccatttgaccatcggcattttcgattgacaccatcttataaacagcgcctaaagcgggttgatcataagccgtaatcaatttagtcccaatgccccaaacgtcaatcttggcttcttgcatcttcaaattttgaattgttttttcatctaaatcattggatgcataaactttagcatcggtgaaacccgcttcatccaattgttggcgaacccgtttagaaatatacgccatgtcaccactgtcaatccggacgccttggaaattaatcttgtcgcccatttccttagcaacccgaatcgcgctaggcaccccgctttttaacgtatcataagtatccactaaaaagacacagtcgcgatgagtttctgcataagcgcgaaaagcgccataatcattccggtaagtttggaccaacgagtgcgcatgtgtgccactcgcgggaatcccaaaaatcttcgaagcacgcacattactcgttgcatcgaaaccaccaatgtaagccgcccgtgtgccccataaagcagcgtctaattcttgcgcgcggcgtgtcccaaattccatgattggatctttaccaaccaccattttaatccgcgcggctttcgttgcaatcaacgtttgataattgacaatattcaacaacgccgtttccactaactgacattgcgctagtgagccttcaacctgtagaatcggttcattgccaaaaaccagttcaccttcaaccgcggagcgaatcgttaaatcaaactttaaattttctaaataatctagaaaatcagcgggataaccaacttcatcgcgcagataagcaatatcgctttccgtaaaatgtaaattctctaaataattgacaattcgttctaagccagcaaaaatagcataaccattttcaaacggtaatttgcggaagtaacattcgaaaactgctgttcgattgtgcaagcccttcttgaaataagttaacatcatattgagctgatacaagtctgtgtgtaataacaaactatcatcaggatataatttttgcatttcgcgctcctaattgtagacatatttggtattaactatatcataaaataaaacgtgcaaacaaaaaaagacggtttttaccgtctttttttgtttaaaagaagcgccagccccatttattaaaatattgcaccattgatttgatgaaaatcttaaaaccaccaaaacttcgatgtgacgccattccatagaaatgggtaacgaccgcatcgggcacgtatagaatttgatgattactttgattaatccgatcacataaatcattgtcttcaaaatacatgaaaaaacgttcatcaaaaccatcgatctcacgaatgacgttcgtcttcgtaaacatgaaggcgccagaaccgtatttaatcacttgccgttcatcggttaaattccgacattcataggccgctaatcgtttagcaaataactgcttaacaaacttaaacggcacaaaccgcaacatataatcaaagacgtctaaccgctgacggaccaaatgttgcaccatcccatccggtccaacaatcttcggcgtcaacatcgcaattgattcatctgcttgacctaacaaggtttcatacattgctttaaaagctgattcattcagaataatatctggattacaaatcaaaaaataatcggatgtcgtcaacgccaagttcgcattgtgcccatgaccaaagccagcattatcgtggccttcaatgatctcaatatcggccgattgatattgtttcaattgcgcaatataatcagcctctgatccattatcatgaaccaatactttaaccggatagtgtcccaataccgctgtttgaatactatctaacgttttaaaaacatactgactattataagtcacaatactaattgtcaccgtttgatttagcgtcttattcatcgtctcatcctaattaatcaatttttgccataaatttgtggagcgcatcttgccatgttggtacttcaaagcccgttgctttaatcttactcaaatccataattgaatggcgtgggcggtaagctttttgcgggtattcttctgacgtgaccggactgacttcgaccgctttgtctttgagaatttcactggcaaattcgtaccacgtacatgaattatcgtttgataactggtacaaaccatacggcacgttgttttcaagcgcataggtcatgaattctgctaacgtccgcgtccaagttgggcgaccaacttgatcactaacaaccgttaaatgatcatgcgttttcgccaagttgagcatcgtgtaaacaaagttcttaccgtattcaccaaagacccatgaggtccgaatgatgtaatacttactcatcgtgttcgcaacggcttcttcgccggccaacttcgtgcgaccatattcgttcttaggggcagctggtgtgtcttctttatacatttgatcattggtaccatcaaaaacgtaatcagtactgatatagattaatgttgcgccaatcgcttcggcagcgttggcaatattttgggtaccgatcacgttaactttataattaattgatttgccaggttcttcttcggccgcatcaacggcggtataagccgcacaatggtatacgattttaggttggttggcttcgaaataagtcgtgactgccgcagcatccgtgatatctaattcagctgcgtccgtcccaacgtattcgatttgtttttcatctagtaaatgacgtagttcggtccctagttgaccattagcaccggtaattaaaatattcatcgttattttcctcgcttaatgtaatttaaaattttcggtttcgttaataataatacgccgccgtatatcacaatgccaatcatcacttgaatcactaatttcaccatactaaacgacatcgttaaattcatatataacacaacgccaaacatcatgaacccggccaataaatatttccacaattcttgggccatttgaccgaggtctaaatcatggcgtacgacgtagaattgataagcggtcacactaatttctgaaaggaccgtcgcaatcatcgcaccttgagtgcctatccataaaattaacggaatatttaaaataatgttaacgatggctccaatcgtgactgagattgtaaattctttattatgaccagtcggtaataaatattgaacccctaagacattactccatgcgattaatagaatcacaactgattcgatcatcattaaaggccctaccggtgcgaaggctttaccgaagaacattgtcgcaaatttcggcgcaattgccgcaaccccaaacatcaatgggattgaaatcacactgacaaaatcaaatgattggtagaggtacttcttaacctgttcatgatcacccttggcaaacgtattggcgacccgtggtaacatcacggtccccgtggcggtgacaatcgctaagaccatcttgacaatcttatcagaattatcgtaaaatccggacgcttcaactgacaccattttcccgaccatgcttttatttaagattaaataaacttgagtcgcgatttgaggcataaacaaaaccattgagggcttaaaatggcgccaaatctttaactcccgccagttgggtaaattaatgtaatgttttaaatacggaaacaaggttaaatttccaatgagttgcgaaatcgataaaatcgcaatgtataaggttagatcacctttgtccttcacaaaaataaaaatacaggccaatgaaattaacttgataataatgtttcgtaggacggtcactttgaaattttcaaagcccataaagaaccacgaaatatcaaaggccgctgcgacaatcaagatggcttgcatgacataggcttgatggtaatcttggacaaaacctaagaatacgaaaaaggcgcccaacgcgatgacaatcgtaatcatcctcatgagaaaaacttcccagaaaatctgggaagctttagcgcgattatctcgataatacgcaatttgccggttaccatataacgaaaccccaatactacctagcaagataaaatattgcgtattcgaattggtaaacgaattaatcccaaccccggttggccccaatactcgggcaatataaggcatcgtaactaacggcactaataacacaaagatttggtaaaaaacattatagagataatttttaataattttcatgattaatcctttaattcatccttaactacttgtaacgcagcgtggatgacttgatgcatgtcataataacgatattggcctagccggccaccaaaaaccactttgggttcggtttgggctaaatcacgatatgctttgtataagcgattggtttggtcgttgttgattgggtaataaggttcgtcaccccgcgaccaatcagctgggtattccttggtaatgatggttttattcttatcacccttaccaaattcaaaatgcttgtgttcaataatccgcgtataaggcgtttcggcatccgtataattaaccacggcgttgccttgatagttatcaacgtctttttcttcagtttcaaaccgtaaactccggtattcgagttcccctaattgataatcaaagaattgatcaatcatgccggtgaaaatgactttatcatattgatcaatgtacgcttgtttctggtcgaagaaatcaacgcccgtttcgacatcgattaaatcactggccaacatcttttcaataatctgggtgtacccaccaattggaataccttggtatgtatcgttgaaatagttgttgtcatacgttaaacggactggtaagcggcgaataataaacgatggtaatgccgtcgctttttggccccattgtttttcagtataacccttaatcagtttttgatagacatccgttccgattaacgaaatggcttgttcttccaagttctcaggttctttgccacctaatactttacgttgttccgcaatcttggcttcagcttcagccggtgtcaccacgccccacaacttattgaacgtgttcatgttgaacggcaaattgtagatttcgcctttatagttagcgactggactgttggtataacggttgaattcagcgaattgattgatataatcccagatttctttgttgctagtatggaaaatatgcgcaccatattggtggacttgaatgccatctacttctttggtgtagatgttgccagcgatgtgatcgcgtttttcgattactttaacgtgattcccgcgtttagccgcttcataagcaaatgttgcgccaaacaaaccagaacccactactagataattagtcatgtaaatagacctcaccttcttttaaatgctttgttattttccgattaagataatgtctgaaattaacaaagaagaaaaacattaaaatgaataaatcaaaagaccattggattgataacatgcccaaaataagatagataatgataaaatacacagcactatcataaattgctcgatcatattggtaatcaataatctttttactttgtaaccaatttgtcgattttcttaaatcaagtaataaatgaataacataaataatgataataatcccaatgactaacccaaattgggccaatacagacccccaagcactttgatcagggaaatctttattttttaaaaacaactgatattctgctaattttttaaccgcacttggggcattaataaaattaaaatgactcgtttgaccaaaaccaacccccacaagcggatttttaaataacgtgataaacactgcttgggtggctaataaacgcatggttgtagaatccgaatcagttttaccgactgtgaagctcaataacatattcttcaaggcaggaaccctcatcacaattacagctaataaagcacccgcgattaagtataaaataatcagattcaatcgttctcgacctttaaccgcccacaacaacaataacgcaatgacaccaaccgccaagatacccgtactagtcttcgctaataccaaaacaccgactaaaacggcaaacaaactataatagaaccaactatgatattgtttattcgggaaaaataaattaactttatttttcattgcgctcaggatgaacggcgcaaaaccaattgctaaaacacccgctaagaaaccggattctgcatacagtccgttaacgcgttgtgtactttgagcataactgactttttcaaatgaaccgggatttaaaacattatgaaattctaaatgacgaccaatcaattcgacaatactttccaaacgtccgcctaaaaagacatagataatttgaattaaacagataccaattaacaacacaaaagcccaaaaattgccggtgacaatttttttaacttggtaatcatgccgcatcaacatattcatcacaaaatagatgattatgaagttcgcaacagtaatcatcgcaatcacaaatttttttagaatactgcccaaaccgtaaccctcattggtcaaaccaataaaagccaagaattgactaatcatgactaatccaataaacgcataatgtctgattttcaaattatccagcggttctaacgaaacgtgatcaaccactcgtcgataaataatgatcaatattcctaaaaatgcggtttgcgaaaagaaaggaatatttaagacgttcttctggataatactcattaaaattaataactgttccatacgctacccactatctgatattaatcaacacgtttaattttcggattaaatcctaatcccgtaaacgtccccttcaaaatggcaccagctcgtttaaaccgactatctttagctttccccaatgtcgacaaagcataaataatgtgtcgaatagttaacttgactgtcgcacctttacctttatacaacttactgatataaatcaaatttctgtataaatagaaataacgattgattcgatcttttgaatcattaaaaatggtaatatcggttaaattattgggggtcttgtggacaaccacgctatcaataacgaaatacgatggtttcgcttggctgacgcgaattgtatattccgtatcatcaccccaaataaataattcttgggttggaatcccgtattgcgctactatttcccgggttaagaatactgatacaaaggtgccttgactaaccgcaactaagccatcattaattttatctggccattcaaaagctggcatcggcatattacatgacgtcccgtctaaccaacgtacattactacatagaaagccaaagttattatccaataacgctgctttattcaataaatggtgagctgcgtccaaattaggaatcgtatcgtcatccataatccagaaatattggtcattagtttgttcataagccatcgcaagtccgtgagcaaagccacctgcaccacctaagttttcatccgaattcttaataataaatttagcatccgcaagcgttgctaaatattcagcagtcccatccgtacttttattattaacaatgacgatgtgtgcaacattttcattttgttctagtgcagccaaacattcttttaacaaagttagccgattataggtcactaagaccgcacaaatattacgattatttgattccataattattcctctccgattgttgccatgatttcagcgtgatattcaggtgaaacgttatccgcaacttgattgccacccgcaacttcattcacgtaccgatcatttaaactaactctttgggtcgctttcatttgataccattcatattctaaatccgcatgcccaatatcaattgcttgataccccaatttggctaaatcatacgccatcacagtggcggttggccccaatgcaattagaattaacgcatccggtgttacgtgcgtttgaatcgttgccataatgtccgaataacggtcaaatgcattttgagcggggcataaaatccgccgtacagattgcgcattggccaataaatcattgcccaccccaaaacgagtcgcttcgccttccacaatcaccacttcacgattctgccaaatctgtttaagtaatgtaaaataatgggccgtttgtgatttatcccgacgatcaatatagaatcgacttaaattagcatcataaaaagttgtttgattgttcagatacggctgccaagctggataataccgtgcaatgagttcaatccaagcattcttgttttgcggcatatattggttcaaaccatcaaaaacatccgggatacaaactgccaaattcggtgcatccgtggccaacagcacttctttaagtcggtcacttaacgcttgcgaattctgttgaaaagcataactgttctcgttgagcagccattttaattctccatctccaaaacgagtcactgacattttttgcgttgcaatttggtttaacgtcttttctaaatcaaccacatttggtttatcggctgactgctgatacttcaaatatcgaccaagcaaaataggatgttttaatcccatcacaaagttatacattggcgatgttagaaaacgattatacaaatttgtatttttaatcttctccactgttaagtcatcctattcttagtctattcattttttattgaccatttttagcgtagtttgcttcaacggctgctttttcagcttgccaccagtcttcatgttcccgataccaatcaatcgtatgttgtaagcctgatttgaaatcggtaaattctggttgccaacctaattcttcacgtaacttcgttgaatcaatcgcataacgtaaatcatgacccggacgatccttaacttgatcgtaagcgtcttgtggttgacccattaattcaagcatcaattcaagaacggctttattatcttgttcgccatcggcgccgatcaaataagtttcaccaatcttacctttggttaaaatcgcccaaacggcacttgaatgatcattggtatgaatccaatcacggacgttttggcctgaaccatataatttaggccgaatcccacttaaaatattagtaatttggcggggaataaatttttcaatgtgttggtaaggaccgtaattgtttgaacagttagaaatcgttgcttgcaagccgaatgaacggacccaagcacggactaataaatcagagctagcctttgatgatgaataagggctacttggattataacgggtttcaggggtgaatttttcccccacgccttcgccgtgacccggtaggtcttcacgtaatggcaaatcaccataaacttcatccgttgaaacgtggtggtaacggacattatatttccgacaagcttcaatcaacgtataagaaccaataatattggtttgaataaacggtgacggatctttcaaagagttatcattgtgactttcagcggcataatgaacgaccgcatcggtcttttgaactaatgaatcgaccaatggtgcgtcacaaatatcaccaacgactaattcaacgcgatcagctggaagaccagctaagttcgcgcggttgccggcatacgttaatttatctaaaaccgtaacgtgcacttcagggtgattattaaccacatagtggacaaagttagaaccgataaagccggccccaccagtaacaataatgtttttcatcttgattgacctctttctttaaatctcaccgtaaacaaacggattatctttttcaaattcagtaaaggttggttgtgcagcatctttttctgaagtgattgcttggtcaaaatcaattggccagtcaatgtttaattctggcgtcttaaatgaaatgccgccgtcggcttcagcgttataaggattgtcacacttgtacaggaagttcacgtcatccgttaacgtcacgaagccatgcgcataacccttaggaacaagtaattgacgatggttactagctgacaagatgtagccttcccattgaccatacgtcggtgaaccagcacgaacatcaacgatgacatccaaaacggccccagtaacgacccgaattaatttcgtttgagcggcttgaccgcgttggaaatgcagtccacgaagaacaccagcttgagtcgataacgaatggttatcttgaatgaaatcaaaatcaatcccagcatctttaaaatcttgatctgaataagattccgtaaagaatccccgattgtcaccaaacaccgctggtgtaatcaatttaacatcttgtaatttagtagttgtgacttttaacttgcccatttttaatacgctcctctaatcttctgcgactaatcttaataaatattgaccgtaatcgttcttcttgagcggttgcgctaattcgatgactttggctttatcgatgtagttcatgcgataagcaatttcttccaaacaagcaacctttaggttttgccgtttttgaacggtcgcaataaaactgctggcttcttgtaaagaatcatgagtgccggtatctaaccaggcaaaaccacgacccattaattcaacgtctaactcacctttttcaagataggctttattgatgtcagtaatttctaattcaccgcgcggcgatggtttgatattcttagcaatatcgacaacttggttgtcatagaaatacaacccggttacggcatagttactagccggatgttctggtttttcaacaattgatttagcgtgcatattctcatcaaaatcaacgaccccaaaacgttcgggatcatttacgtgataaccaaagacagttgcgccagtctctttttgagcagcgcgttggagcatttctgaaaggccaccaccgtaatagatgttgtcgcctaagatcaaacaaactgaatcgtcgccgataaagtcagctcctaggataaacgcttcggccaaaccattgggtttgtcttgaaccgcatattcaatatttaaacctaaatcatgaccatcaccaaataattcttcaaaacgtggtgtgtcagtcggtgtcgaaatcaccataatatcttgaatcccggccaacattaaaacggacatgggataatagatcatcggtttgtcataaattggaatcaattgtttagatagtgcccgggtgattggatacaaacgtgtgcctgaaccaccagctagaataatacctttcatcgtcaaaaatcccctttcaaataacaactatgaccatgttaatatttgcagaatataaaatgcattgcgtccaaaaccactctttaagataccgtatttttttaacttttgatatcttttaacttggctaacctgcgttacatcttggaaaaagctaattatttcaaccttatctgccggtaggttagggtattgtttaacaaattcccccgcctgatccatcgcagattgtagcattgattttgtttttttaaataaatgtttacgggtcattaattcgttaaaactactcttggcacccacttgattgttaccatgttgccgatagagaatagtcgtttgattaacaaagccaattttaccaaaggcactagccactaaggcgaaccaccaatcatgcatttgaatatggtttaaatcaagattttgacaccggtctttcaaattttggttaatcataacagtacagccagtcaccgagttttgtactaagaaacggccaaatgtggcttgtggatctaagccttgggttttaatcatcgattcactcttaatttctaaatcttgatcaaccactttcaaatccgtgtgaactaaaattggctgttgctggttctgactttcaatgacttgcatcttagctaaagtcagtgccactttttctggcaaccagacatcatcttgatcacaaaacatataataatcagcttcaacagattgtaataattcaaaaaatgaaccgataacgccacgattagcgggtgtattttcgttaatccaatgaattttaggattactttgatattgcttaagaatcgtcaatgtctgatccgttgaaccatcatctcgaataaatagctcccaagtctgattcgattgattaataatggattcaatttgttctggtaaatattgttcgccattataagtggataataatattgctactttgtctgccactatcaacgcctcctggatgctttatttaagatacagactaccaataaacggaattgttgcatcctttgtaaactttataactgctaatagttgatccttcatcgttattttaggttgaacaaccgtgaagattccatctactttcgttaacgccaaacgttcttgaggattttgaacataccccatgacaaaaattaattggtcttcattttctggaatcattgttgtttctttcgtaaacgcatctttagccgctactagtttgacatcaaattgccattcttttagttgattgataacttgattcaacagtgtgacttgctgatcgtcagtgatgacagtcccaacaacttggtaattgctctgcacatgcgcaactaagtcagccgcaaggttttgaacatcactaatattagcgtcattgataacagtcgttgcggtccgcgattcaataaaattccggctcacaattttttgattaaaatacttacgtacgaaaattaagcccgctgataagaataagcctaaaacgcctgcaaaaaacacaatcttcttagcactcattcgagttgttgtcgtactcgtagattgattatagtctattagtttaacagaacccgttttcatatcttttttatacttttctaacgcaattttgtcatacgcgcgactaactaaagtcacttcttttttagtgtcccctgatactttcaatttcataatagttgtttgaggaatcgcttctaaagtgaccattgaatcaatctcagaaaccgataatttcaatttctgtttagccagttcccgtttaactgctttttgtgttggggtactttttaaattttctaaatatgtattcagaaaaacaggatcgctactattaaaagtcattactttttcatcagcattatactgtgtaacctgtaatctagaaatagtatcgtaggtcgttgccgttatcccttgacctctcaaaagtagtccgaggacagcaaagcaaactgctgtcacaatgataataataacattcttaatcgtcatcatttcagttaaagcttcatccacactatatttcttattcatatgattaaacctcacccatttttatatgcataaacaccaataagcataccataaacgtcagtctatagggtatttaaatcagagtttggaaaaatttaacaaaaaattcaccaaattatcacttaattaatatgccaatccttattatggtatattgagtactataaagaattactgagtggccaaattagtccgtttttaacccacactagctagattaactaacatttatcgacctacagtattattttcagcttcaagctattctaacctccattaaacctccattaaacatcacttaattattgtcataaaaataacagaaagttgagaattccaatgatgttatattcacttaaagaaacattcaaaaataataagcgctactatggtgtcctaatatttgccttattaattctattgattagcaattttagttttactaaactccttggtgatgataattattatttaacagccatagccagtcaatttcataatagtctatttaattttctgaaattccattattactcttggtcatctcgactcgttatcgaggctgtcttgagtattctagttaaatatttctggctatggcaaatatttaatagctttgttattttagggttaatcattattttaaatcattatttcaatcctaaaaaggatgtactatttttaataattagtattttattattgttgctaattcccagccaacaactttatgaaaccggttggattgcaacaactttaaattatctatggccggtcaccttttgtctcttcggcttctatccaatctttcaatatctaaaaaacaatctaccaattcgccttcacagttatttgattacaatcccactccttatatttgcgttaaaccaggaacaagttaatatttgttttttttcattcttattatgtatcatcctgtattgtctcttctcccatcgcaactggcacctacttttaccacagtttttcctctcgcttatacaattaatttttacttttataacacctggtaacattaaacgcactgcggttgaaacagcccatcgattcccagattatataaattactctataatgcataagctggatcttgggcttactgccaccagtcgtatgttctttattgaaaccgactttatgattacctttttcttgatttcgcttaccttgatgatcttttataaaaccaataaaatacattaccgcctcctctctcttgttcctatttcttttaatatattgtttattttcttcaatacactcaataataaaactgtgtttaacctgtttgttcctcgcttcttaacaaaagttaccaatactgggactggctttaatattcgtgtgccgataacatggattcctgatattagtttcttagtggcgttttgttcaatattgatttgcttattcatcatatacaacgatgccaagatgaaaatcctctttccgattctattcataatgggaatcctctctaaagtggttatgggctttaccccaactgtatgggcttcaggcaatcggacaggttttattctttacatctgtttaatacttattttactttcgttcttaaatatttggttaccgcatattaagaaatcattagccaaaagcgtggggtaatgtttaggtataatctaattacacaataaatttagtagacacgtattttatgcttatcatttagttaaaaatattaaataacggtattatcccaaattttgagataataccgttatttaatttattcaaacattaatgtgcgatagtgcttataatgcgactaatttagtttaacgataatgtctaaattctatactattctaattcgtcaaaataaacatcttataaaaaagtctcctaatcggtttaatcaccaaattatccatgctaatggcgactaccgcagctataacatacgtactaacgaaaatcagtaatattcctataattgaatgattctgttgtaaataaggaacaattattaataatacggcaccgtgacttagataaataccaaacgaataccgtgacaatattgcagtcagtttagtaccggctaaattccgacatgccctactatttaacaaaccattgtacatcactactgacagtattatgtataatggtgataaatcaaataatccccacgcctttgattgtgggaagataattaacaataaagtgtttacaacaaccactaacgcaataattagtaatcgttcaaactgcgttattgatttgttatttgtctctaacagtctgcctaatagaaaatagattaaccaaccagaaaatggataactatttaaaccccaattaataccaactaccttgaataaccaacctgctacttggataccaattaatacaatcataaaaattttttgttcagtgttcgataattgatccaacattttacttaaaaaaggagctgcaatcaaaaatgcgattaataaatacataaaccaaaagtaagttgttacataattctgaaaaatattaaggataaaaagatggacaaatgatttcacagttttaaatccacctgtcagactaactgtcacaatataatatatcagctgataaattattaaaggaataataatattaatgacttttttccaataatattgattatagtcttctttcttggtgcctttaaaatgtaaattaaaatgaccgctcatcatgaaaaataatggattacaaagcataattagtgtggttgcagcttccttccaaatttgattcgtcaaacttggtgcaagctgaacactatccattgcatgaattaaaatcactaatcccattgctatcactctgataagatcataccgacggtctctcatcttaacaaccatttacttttccccctattagacagataatctatctctgaataatagtatactggttattaatgtctgcgtaaattgtttcccactattcatactcaaatctattattttttcataatgaatttatcaaattttgaaatatatcttaattttaccagtaaattagctgctcatttcagttagcttagttttatttattcttctaaattggcagatactcttacgactttttgatttgaacggaaattgatgagttctggtgcgcgataaagaagcgtattgcgacttatatcaaaaactctttagtttgttagaaaatcagcgtctccagtgtcggtgcttctactattttttgaatatgaccatcttttaaaacgattgcccgtgaagattgactcgctagcgttaaatcgtgcgttaccatcacaatggttttcccggttgtcactaattcctgtaaaatcgtcatcaccaacaaccgagaatgtgtgtctaaggcgctggtcggttcatctagaaagataatatcgggatccgctaaaatagttcggccaatcgccaccttttgttgttccccacctgataaggcatcgattgattggtgtaactcagccttcagttctaatcgcttcgtcaaagtagccacggtggccggtttaatccggtggccgtttaacgttcccggtaataccagattatcataagccgttaacgcgggaattaactgaaaatgttgaaaaataaacccaatttctttgcgccgaaacgttgctagctttgtcgcgttccaaccatatggattttgaccgttaatcaagaccgttccagtcgttggtggtaataaacttgaaatacaatagagtaatgtcgttttaccagaacccgatggtccgacaattgagataaactctccctttttaacatcaaaagaaaggtcgtcaagtacaagcaattgtttatttttagccagttcgatttcttttttgagatgcgtcattgaaatcacactttgatgcatgctgatcagctccctttaaataatttgcctacttagctcattcaatgtattttttagtcgtccgtaacgctaatccgttgattaggataaaacagccaaaaaagagcgagaatgcgccgaacgtgagtgcacaattaacggtccagttggctttgaaaatattgccaccccctaaatacgttacccgtaatagcggaattgcaaacagaaatgtcccaaacaaagtgattaaaactgagatcaacgacgccgttccaatttcaattaattttaatttaaatagccaatttggcggacaacccgaaaagaaatattgggccgattctgttctggtttttaatctaaacaaaccaatcgaagtcagcacattagcaaggctgatgatgattggtgcgccaaatacaaacaacagattaaagattaaatcatatagatagtccgcactattgtgtccatcaatcaataatttagtattgagaaataacgcaataaaattgccgactaataacgtaatgacaatcacgggccgacttaatttaattaatccttcgacattgtattgcatattatcaaaagctgaacgcaacataggctgttttgtgatacttggtaaatcaacgatgcgcttcacgatgcctttaaaaagggggcgaattaaaaagttcatcccaattagcaacgccagccagaccggcagtaatagattcattgaacttgccatactgctcgtataggctttaacgtcagttggattaggcactgccttgatatacagcataacggttacaactagacagaataaaagcgcgacgctaccactaaacaagccagggtgtcgttgtttgtccaattgattagtagccgataatcgcccttttcgttgttgataatttttaagacaatacaacaaactcgtaatcgtaatcagcatcgcttgtagcaatagggtcacgtagaccacctgccctgaaaattgcaagggcatttgcgcgagtgcgtgacgatcaaccgttggtaaaatattgataaaagcttgcgctcctttgacagcaaagagattgccaatcagtgcccccagcagcccaaccaataacatttgtccagtcataataacgctcaattgacgtggtgaaacccccaaaagcattaagatatcgttcgtctcatcaaaaagatcaatacattgtttcatcgcgttccttgctagtagcaatatgacgagacttccaacaaacattggcatttcaaaaaagacgccataatcaaattcggcgcttaaggtattcggcccaaccagtttgatggcattcaagatggtcaatatcgtactaaaaacgaatcccgaaacaataaaaaggggtaatacggctaaccaaatctgccaatgcttgataaatgacttcactattaatttaagcatgatgccctcctgacctattttcattgacgacttaacgttattcaaaatttccgatggctaaagattaagtacccgaactcgagaaatacgagcgtataacataaagccccaccgataatttgcagattacttaattgcgttaactcatggtaaacaacgtaggtcgtatactgattctgtaggttcaacatatttagcggattccatttaatgatgaaatcgaaggtctcgtatttatttaataaattatccgacaaaccctggcccataaaaatcagcacaaagctgatgaccaccgctaacgaattgtttttagatagacttgaaaagaaaaaaagcaaagcgattgtcaaaagtgacgccactagccccaccaacagggttaatatcaaattaacaatcagtggttgctgatactgataaactgtgaaccaatcaacctggccaggaaagatgatcaatgataggccaatcgttaagccaaaagcaatcacgtgtaaaataacatcgtagcaaaaaattaccaagaattttgaaaaataaatgtcgcgtttattcgatgctttatacaacaacgtcagaatggtaccctcttgaaactccattgaaaagatacccgcaccaatgaccactaacagcatttcaatccacggccccgctaaaaaggaactgattactaagtaacgactgaattcaaatttaaataacagccatgccaaaagcattaacggtactaacaaaatgggtgcataccagaccatctttttatggaaaaatttgtagtattcttgatataaactatctgccatcatctagctcctttttgactattagtattgggtttttattaagctaattgtgacttcgtttaaacagtcgataccctaactctagaaacagtagcgtatagcccgcagtcccaatcatgatttgaggattattcaatttcgtaatcgtgctaaaactgggatcagccagttgccctaataaattcaacatattaaacggattccatttcaataacgacactaaatctccggctgactggataagcctcctgaaatcgtttgacctaagaagacaatccccacgccgatactgattgcaacgacgttcactttaaataaacagattagacagatagcaagcgcaatgattaagagtgatgccatcaaattgattgtcgttagttttaaaaacgttttcaataaaggctggttgccagtctccgtcgaaaaccagtgatattgattaggatagaaaagcagcttaagcagaatcgtaaagccgattgatgaaagatgtaaaatgccactatagcctaaaataatcatcaatttagcccaataaatggcccttttcgtcggacttttataaaacaacgtcagcagcgtgttattctgatactccattgcaaataagtttgcactaaatacgactaaaatcaaagcaatccattgactagcgccaaaaccttgaacaatcaaaaacgccacttgatcgtcactatccatcaataccgtaaaaagcatcaggccaaacagcatcaaaacaccatagtaaaaacttttttgatgtttgaccttaaaccattcctgcgccaaatttcgcatcatttcgggttgacctcccgctctttcaagacgttaacaaccacttcttcaaagtcaattgtaataggcgacaattccagcaactgaataccgtgcgcataaatgatcggttgtatttctaaaatacgactcgcatcaatcattaaataggtttcgttgttctcacttttaatgccgttagcgtccaatagtgcaaccgtcttagccagattattagtcaccagtttatattgctgatgctcattttgaatgagttcggtaatgggtttttcaactaatatttcaccattattaattaagacaacatccgttatcactttttcgagttcacttaagatatgacttgaaattaagaatgaggttcccccatccgcatattttttaataatctgacgcactagaatcgttgcttcaatatctaagccattcatcggttcatccagaatcacaaactcaggttgatttagtaacgcaatcgcaatccccaatttttgcttcatccctaatgaatattgcttagatttatcatcaacataggccgtcatttccaacgaagtgacgaggtccagcacgtcctgttgatttttacaataaagcgtcaggttttggcgaccagttaaaaagggataaattgcggggcgctcaatcaaggcgcccaccttggttaaagcctgatggttattgaccgttaccgcgctcccgttaatttggatcgccccttcaaacttcaataagcccaaaatcgttttcataatggtggttttaccagcgccatttgggccaatcaaaccaacaacggccccctctttgacctgaaaagaaacctttttaatcacctgtcttttcgaaaaagaaacaactatatttttaacggttatcataccgcacccccctattctggataaaaaaagaaccctacagacaattaagctatggggttcatttcaatcattagtgatattgaaatcactaatgtcatgcaattttaagtttaatcttttcttaacgtaaacgctaaccgccgagtttgcatgaaatgttggcacacaccagcgataatgagtggcactaggatactaatcagtaaactgatccaagccataggttgttgactgacgtgaagcatactatcggccgactgtgtatcaccaaagatgacaacaacgtcaaatgataatgctttggcccacgctggtaaaatgctcgtcagaatgggggcaagatattgattatagacgacggaccaaacaatgtagatgacgaagatgacccaccacattttcttttcaaataacgtcatgaagctactgatttgaagggcgctggctaaaagtaaccagccaactaggattaccatgataacaactcgtggcgctaatagaaaagctaatgaggcattataattcatccagacggctaataagtaaccgattaagaaggtaatggtttgtgtgctaaacaaagtaaccaattgtgtggcgtaactcgtttgtcgggagatgccattttgaatcccaaattcaaaaaagggtctaacagatgtgaatgcggcaatcataatcacaatttgactggcaattagcccgccaaaaaccatggcgtaagcaataaatttcacgtactctatccaactaaaatcgacgtgttgatacaggctgacacccacggcaataatcgctgccacaaccactgtcatgaatacgccgagtagcgttttaagcacggtgctccataattctgttaatctgtaacgtaacatggctttaaacatcacgattcccccgttcgttagttaatttaataaaggtttgttgtaaatcaacgtgttcgattgttaagcggtctggaatttcacgttcagttggtaattgatcgtaaatataagcgatatacaacgttcccaactgttccgttgccagttgattcaattcctgacaatacgcttgaacgacttcctctgggccactaatccgataactcttcgctagcaccgtctccaaaggttcatcaataatgacttgggtttcattcaaaatcacgacgtgttcgattaaattagcaatctcttcgattaagtgggtcgctaagacaatcgtccgtggtcgttcctcatacgccttcaaaatgaattggtacaacatttcgcgatgattcgcatctaaccccagaatcggttcatccaaaaagacaacttcggctgggacgcacaaggcgagcatcgctttaaaaatcgttcgataaccggtagataattgacttaacttcttctttggattcaagccaaaagccgtcatcatttccgctgataaagtttcatcaaactggccctgtaacaaagcggtatttttaataattttattgagccgttcttctttagagaacaagttggtttctgacatcaaatagaacgcttgaaccggatgatcgcggccagttagtgcttgatcttgccaactaatcgtcccgctactggcaaaaatccgattggtgataatgttcaataaggtacttttaccgaccccgttacggcctaataaaccataaatcgtatttggtttaaacgttagattaatgtcatccaaaataacttggtggccaaattgtttcgtaatttgcgttaattttagctcattcatgatcataccctctttctattaaggccagtagcgccgttttcgttaagttcagttgtttggcctctttgactaaatcttggacgtgttgttgataaaacgccgcttgtcttttttctgtaatttgtgctggtgctgtttcagtcacaaacatcccgagtcctcttttcttttcaatcaggccagccgtcaccaattgattcatgcctttcaacacggtcgccgggtttaaattgaattgccgcgataattcggtcgtcgatggcacttggctatccggtgggaaaataccggtaaagatgccctcttcaatctggttcgcaatttgacgatagagtggttcgtcgttattaaattcaaataacacgctaacacctcctgtttacgttattcggttagttggttatgtaactaactataacagcaaagtttcaaaagtcaaccatgcaatcaaaaaaacacactacttcgaatatttcgaaatggtgtgtgctttaaaacagtaaattagtagccttcagtcaaactaaccgtattgtaagttaggtggccatccgctaaaaaagtgggcaagttacgggcaaagacagtgtacacccgctcgtgtaaatctggaatataaccagaaatatgcggtgtaatcactaaattaggtgttgaccagaggggtgaatcggccactaacggttcattttgggcaacatcaatcgctgcaccggccaactgaccggcattcaaagcggccattaatgcggcctcgttgaccgattttccccgaccgacgttaaagaaataagtccccgccgctactttcgcaaagaaatcagcgttaaaataatcggtcgtttcagacgtgagtggcatgccgttgacaataaaatcggcctgttctaaaacttgatcaaccgtttcagtcgtcacgatttgttcgaaatgattaatgggttcgccattccgattaacgccgatggttttaagccccatcgtttgcgcatattgagcgactttttcaccaatttgaccagtcccaaaaattaaaatcgtgcgaccttcaagcgtcatggtactttgcccgattggatgatgatcccaaacacgttggcgctgcgcatttaaactttgataaatgccgcgtgtaaaatacaataaataactcatgacggtctgggcaatcggtacggcgtgcatgccccgcgcattcgtcactaaaatgttctggtcaatcaatgtttgcaatggcaaatagtcaatgccagaagtcgcggtttgaatccatttcaaccgatgattagggattgccaaaatttgggggccaatcaccttattccagccaaacataatgtcaatttccgccaattgcgcttgcgatacatccgcgcgattgataatcgttaagccctgttgcgctaattcaatgcgtgctgtttcgggaatattttccgctgctaatatattggtcacgataaattcctcaccttgtattgaagtagtcttaagtataatggattgacgccaaataaaaaagcattccgcctaaatttaacggaatactttataattttatttattatttttcagcacgtggccaaactggacgaccccagtattggaataaatcggtttgaatccgaccattatagagtttccgacgcttagtggcccgttgtccgtaagattcttggaactgtaaatcactcgttaaaatgtatttactccaagtcttcattgaacggtaagtgtcacccatttctttgtataatgcccgcgcttgttcttgatcactcatccgtttaccgtaaggtggattcgcaattaaaacaccattggttaaatcagttttaaaatctttaacggctaattgtttaaattcaacctgatggagtaccccagctttttgggcatttaaacgggcaatatcaatcatattttgatcaatatcataaccgaagatttctaagggttcatccatcttaacgagcgattgcgcttcttctttaacgtttgctagaatttctggttttaaccaatcaaattcttcaaaagcaaattggcgttgcataccaggtgcaatgttatggcccattaaggccgcttcaatcgcaatcgtgcctgaaccagttgttggatcgacgaatggcatgtcgttgtgccagcgtgataggagaattaatgacgccgcaaagttttcttttaaaggcgcttcccctttttcaagacggtaaccccgtttaaacaaactagccccagtcgtatctaaactgatcgtcacgaaatcttttaagatgctgacttctaacggataagttgagccggtttcagctaaacgtgtccgccgatgataaacactacttaacttatcaacgatcgccttcttcgtgatggcttgaacgtctggttcactgtgaagtgttgaccggactgaccgaccagcaactggaaaagcggcatctaatggcaaaaagtcatcccaaggtaacgccttaacttgttcaaataattgatcaaaagttttcgcttcgaattgaccaattgcaatcttaatccgatcagcactccgtaaccaaagattggtccgggcgatatcggttaaatcaccttcgaaataaacccgaccattatcagaacgtgtttcataacctaaatcttgtaattcttttgccgtgattgattcaataccacttgccatcgttgcatatagttggtaagtcattttttaaagatccccttaggaaaatattttttaaataaaaagagcttgggcaaaagcccaagccacctgattgtaaacctctataggccatgttttgttccagaactttcccaggaagaaagttccttcagtaatcatctatctgttcttacgaactctcatttttagttcatttccataaatgagacgcccctaccaaagtttgggttactcgctcgcggggtttacctcgttccatcgtttgggtttccccaaccgctccgtcactgtggcactatttaaggatattaacgcatgaccgaagttttagcgcgttttccgccgttaccaattaaggtaccctggcttattgggccaggcacgaacactacaagcatctcagcctgtgcgggcatggaccttcctcagcctactgatgtagaccgcgattactcaagatttacaatgtttaatcaatgtaaactattataccacactattacatatttgtatcattaaattgagaatgattttgaactctcgtttgacctgccggattttgatcacttaatttagcaccaaaaacgtggcgttccaaattagaaagacgcttcaaaatatcatagttcgtcgctgctgatgtttgttgtggtgcattttctttaacactatcagaagcattcaactgtttgtttaattcttcaaccttgttaaataaacgggtattttcagccgtcaagcgcgtgatttcttcttggtagctttggtaatctttgataattaaatctaaataaccatcgacttcctctgaatcataaccgcgcatctttgttttaaattctttttttaatatttcagttgggtctaattcgactttgatttgattatccatattgacacctcatttataataaacgcttcatacatgtaattatagcaaagataacctagaattaaaactttagattctctagctccgctaattcattcgcgacatcctgtaattcaaagaaatcgacttggtttaacggataatccgtctggcctcggtactggccaatcgcttgataatcgtagctaggtttaccttctgcttccggatcgtaatataacagtgcgccgtcggtatgacttaacatgaactgttgatactgtttcaattgttgtggcccagaatatggcgcattcgagaccggctcacaaaagtcgacctggccctttaactgcaccaacttagcttgattttgctcattccattgttgaccaaaatcattgaacggtaacatcaacgccgtttttaaatccggataatccgtctttaatgtttgagcaacctctaagctccactgttcaatccccatttgaccgcccgtaattacccattctaaaccgtcgtctaagaaatttgttaattgtttttttaaagaatatttaataactttaagtttttcatcattttcgccgaaaacacttaattcatagcttcgatagccagtgacccataaacgttgcatggtcttgcctcctacctaatgattttaaaatcacctgaatattgctataatgattgcacaggagcgtgattttcgatgacctttcattatccaaacggacaaccttacttaaataatgaagtaccgcagtctaaaaagcaagccacccgaccaaaagcaaccactctatttggtaaacggggcatgtcgcttgaagaagaattaaacgatagtaatcaatattatcgaagccaatcaatggctgtcgtctataagaaaccgaccccgattcaaattgtgaaggtcgattatccagcacgcagccaggccgtgattaaagaagcctattttaaacaagcttcaacgaccgattataacgggatttatcaagggcattatcttgatttcgaagccaaagaaaccaaaaataaaacggcctttccgtttcgtaattttcatcagcatcaaattgaacattttcgcgcttgcttacaacaaggtggtatctgttttgtgattatgaagttcgttcccttgcaacggctgtttctattgcccgctagtgaacttattacccgctgggacgcacaagcagatggcgctcgtaaatcaattccacttgaaattgtgattaaacagggctatgagattaattatcaacttaatcccacgattccctatctaagcgcggttgatcaattaattgcgtaccaagtcaaaaggagtaactaatcatcatgtccgataaaaataccggtaactcacgtgtcgcacggcacaaaaaaaccaaccagaaaccaactgccaagaaaaagaagtcgttattctggcgcattattaaatggggcattttagccgttgttgtgctaatcctcgcgggaattgggctctttgcttattatgctaaagatgcacccaaattaacccagtcagatcttgagagtgttgtttcatcaacgctctatacaagtgataacaaagccttcaaaaaattagggttggccaacagcactcgtgcatcgagcgaacaaattccaactacgcttaaggacgccgtggtctcaattgaagatcgtcgtttctataaagaaaaattcggcgttgatccgattcggattgcttcggcagcagtttccaacgttacgggtaaatcatcgcttggtttgcagggtggtagtaccctgacccaacaactcgttaaactatccgttttctcaacgaaagcatccgaccaaaccttcaaacgtaaagcgcaggaagcttggttagccgcacaagttgaacgacaatattctaaggaccaaatattaactttttacattaataaggtttatatgaataacggtgtcaacgggatgggtacggccgccgactattactatggtaaaactttaaaagaattaagtttgccgcaactggcgttattggctggtatgccacaatcgccggcaggctatgatccctatctacatccagaagccgctaaaacccggcgtgatttagtgctagatgcgttagttcgtaataataagattacgactgccgaagcgacagcggctaaggccgtacccattgcgactggcttagttgctcaaaaagatgccgctaatacatcaactgacgataaagcaactgatgcatacgttaaagaagtcattaccgatcttaagaaaaaaggctacaacccctatactgacgggttaaaggtttataccaacatcgatatggatgcccagaagaaactttatacaactgtcaacgatgatagtagcattcccttccctgatgataaattacaaaccgcggttacgattaccaatcccaataatggtaaaatcgtcgctatgattggtggtcggaaaactggaaatgtccaactcggttataatcgggccgttcaagccggtcgtagtaatggttcttcaatgaaaccgctgatggattatgcaccagcgattgaatatctcaactattcaaccggctacaaactagtcgatgaaccgtatacttatccagggaccagcgttcaattgcataactttgataatcaatatgtggggaccatcaccgctcgtaatgctttagccaattcacgaaacgtccccgcgattaaattattggccgatgtcggcatgacgaaagcgagccaatttgtggaaggccttgggattacgattccgtcagatgctggattctcttacgggattggtggcaatgtatcgaccttgcaagaatcagccgcatatggcgcttttgcaaacggcgggacttattataagccaacctatgttagcaaagtcgtgacggccgatggcattacccataattacgattctgagggcactcaggccatgaagagctcaacagcttacatgattaccgatatgttgaaagacgttatcagcaaaggttctgggacactcgcgcaaatctccggcttataccaagccgctaagaccgggacaaccaattattctgacgaagaagtcaccaactcagctggcgccatcaattctgacttagctaaggacagctggtttgccggctacaccaaagactactcggtcaccgtttggaccggttatgatgaacccttaaagaacggtttaacaatgagcgaacgaaacgttgcggcttacatctaccgttcgatgatggtctaccttgcccaaaacagcaccaacagtaactggacaatgcctagtaacgtcattgccaaaaatggtgaattatatattaaggggacgacaaccgctgaaagtagtagttcaagcagtagttctagtttctctgaaagtatattaagtagctcttcgacgagctcgtcaacgagttcaagtagttccgaaagtagtgttgctgaaacgagcagttctgaaccggttgaaacgagttcctcatcggttcctgagacaaccagctccgctgatccaggcagtacttcttcagaatcaaatgctggtggcgacatatcaaccacaccaagtcaataaaaataagctaggcctattcgtctgaatgggcctagcttatttttatggtgctattgctaaccacgatcggctagatattgttgaccggcagcacagatcgtcaataaaggacattgctgacatttgggattccgtgccgtacaatattgtcggccaaataaaattaatgtatggtgggctttaacccaatcgctttcgggtaacttagcctgaaaatcacgttcaatttgaatgactgacgcattctgggcactgattcgcaaccgtttagcaattcgagtgacgtgggtgtcaacagcaaatgagggcacgttaaacgcatcacccagaacaacattggcggtcttacgaccgacgccggcgagttgttctaattcagcgtgggtttggggcacttcgccaccaaaatcagcaatcaactgttggcagcaggttttaatgtgtttcgccttgttgtgatacaaaccaattgaatgaatgtccacttcaatcgactccagagatgcgtttgcaaaactcgttggtgtcggaaaatcccgaaataatttaggcgtgactttattaacagacacgtcggtcgcctgcgcacttaacatcaccgcaattaacaattgaaatggtgaatcggccaccaacgcccctttagcatccggaattaatgtatataattggtcaaaagcccaacgtgtttttgttttagataacatttaactcaccctttcaattaaaatcggggatgtttctgctgataatcctgcaagtcatccttggttttaatattttgcttttgccaatttaataaaatacgatcgacatatttcaatgaataaacttgattaaaaacggcctcgcgcacggctaattgaattaaatcgggattataccggtctaaatccaaccaattagcaataatctccgtttctaacggcgatagtggtcggccgaataattgttcgacttgattaaaaatcatggcgcgttgattctgatctaaatcagcctggaccgcttgttcggcttgcatcgcaagaatactcaatttcatgagggttggcgttaaatcatagcggtcgacggcctgaccttgttcattttcacgcgattctaacgtgattaactttttttgaatcaagcgatggaccaactcgtagattgtctttgctggcaactgcatgcgttcgccaatcaacgctaaatctgggaactgatccccttggctagcaaaatcagtgagctgcaaataaacggttagttcatccgttgacatcttaagtgttcgatactcctgcaacagtagccgtgagatgctcacttggcccccgtttaaatacgcatttaattcattcatattctagcctactttatccaatgtcattactatcattgtaaccaatcttaccacataaaaacaagacgtctgaataatcctcaacttaggattatcatgcgtcttgttgtttgtccgatttaaaagggattaaggttgaatccggttaatcattcttgggaatggaatggcttcacgtaaatgatcaatgccacaaatccaagtaatcgcccgttctagtcctaaaccgaaaccagaatgtgggactgaaccgtaacgacgaaggtctaaataccattcgtagtctttcaaatctaagcccattttaacgatttcggcttctaacttatcgtaatccgtttcacgttcactaccaccaatgatttcaccgtaaccttctggtgctaacaagtcagcacataagtagacatcatcacgcgttggatgtggtttcatgtagaacggtttgatggcctttggatagttcatgataaagaccggttgttcgaattgatctgataaataagtttcatcaggcgcaccgaaatcatcgccccatttaacgtcaaaatcagcagcttgtaacatttcaatcgctttatcgtacgaaattcgtggataagggagttgtgtatatttctttaattgatcaatatcacgatctaataaattcaagtcatattcacaatgatcaatgacgttttgaaccaaataagcgatgtatttttcttggacttctaaactttggtcttgattcatgaaagccatttcgggttcaatcatccagaattcagttaaatgacgacgcgtctttgatttttcagcccggaaaacgggaccaaacgtaaagactttaccgaatgccatggcgcccgcttcagcgtatagttggccactttgcgttaaataagcatcgttttcgaaatattcaatgtggaataattcagtagtgccttctggcgcgctaccagtcaagattggtggatccatcttgatgaaaccttcttggttatagaattcataagtcgcacgaatgatttcattccggatttgcatgattgcaaaagtccgtttcgaacgtaaccataaatgacggtgatctaataggaattcaacaccatgttctttaggcgtgattggataatcgccactctcaccgactaattcaatgtttgacacttcaatttcataaccgaaatgtgaccgtgtatcttcatgaatcacacctgtaatccacatacttgattcttgttttaaatctttcgctaattggaaaacttcttcgctgacttgacttttaaccacaacaccttggaaaaaggcactgccgtcacgcaattgtaagaaagaaatcttaccacttgaacgtttgtcagttaaccaaccgccgattctgacttcttcatcgacatggtctttagcatcgataatactgatttgtttaaccatctactcggtctccttatgtctattcatttcaataaaacagtccaaaaataactgataatcatcattatataacaaaacactgattgtcacagcttaaattggcaattattcgtaaaaaaatttagatattttcaatcaattgaacggtatcgcccgatttaaaatctaacgttaaataacacaaacggcccttattcgtccgataaaccacttcccaaaccggtttattcttgaacatcccaaaattaatattcaacacttttttaggctttttagtcgaccaagttttctcgagcgcttcattcttagtcatcccggctgattgacgataaaccgtggcgtggttgcccttttcattgatcaagacgtaaatcccacgaccagcactattctgcccactaaccgtataatacgtattcttacgatgatacgtgtagaaatcatcggggttctttaatttagcatatttttcagcaatcgcaacggcctttttctcagctgtcgtgtctggtaatctagcttgatgataaatcatcaacatggcgcccatcacaacgagtagcaggacaatccagagccattttttgtatttacgcacgtgttttctctccccgtttattcggataactttattatagcaaaaatgcaagacttactttgccaaatcaagcgaatttagtctgaatttaaccaaaacagatcaattagttcacgaatcgtggtcaccggtgccgctttttgtggcaaactagccggtagagcccgacacatctgttgaccatactgggtcgtcaacaagcgtggatctaagcaaacaaagacgccgcgatcatccgacgtccgaattagccgaccgaatgcttgccggaatcgaatcgtcgctttcggtaatgcttcagtcttaaacggattttgcccttgcgccgttaattgcgcgtaacggactttggtctgaaccgcattcggcgcatcaaatggcagttggactaaaatcaccatttcaagcgctgattccggaaaatcaattcccgccatgaagctactcgtcgctaacaagacggcgtcatgccctaacataaaccgtttggtaattttttcagcactcccggtgaccccctgcgctaacacttcgcgatccaaacttaatccggcgtgcgccaacgcgtaatagacttgttcaagcgtttgattcgcattaaatagaatcaatgtttggtgcggattattggtaactagcgttaaaatctggcgcgcaatttggcgttgataatcgttaggcgttaactctttttgcaccggaccatctgtggcgattaagaaacgggcttgttgtttgaaatggaacggactccgtaatttcttggtcattaatggttgatcgtcatcgaaaccaaattcacgtttcaaatacgtaaattggccattaaccgctagtgtcgcaccggttaaggtcacgggttcgaaatgttgtaacaacgactgcatctgagtgccggccgaaaccaattgccattggagcttaaactgtggtaattgactgggttgcgccggttgaatgctttgaatcgacaaagcgtgttgttcctgcggtttgaccgcaataaataactgctcaaatcgttggtaatgttcaacatcggctaacaataagttaatttcattttcaaaggcttgccaaacacttaaatcactcgcagcataccgttcgagttgttgctctaagctatagcgtaacgctaagaaatggtcctggatcgtcaataattcccggttcaactgtttaaactcacgttgacaaccgttgacgaattggatgacttcatcaggattcaaataccgatccgtaatcggccgttgttggtcacgcacatcaaaactcgtttttaaataggtctcaagggccgtcagtgtccgagtcagtttggttaatgttttatgcagatattttaacgaacgattttcagccgttttaggaggaaataaagttgctagattattactctgcgtggtcgttgtatattggagccctttttgcgcccacaattgccagcgggataatgaccaagtctgttgggcaatcgattggacgttaaaaatcatactttgtgcttcgtcgaccactaaataagggcgttcaccccaggtttgttgatcactagcatgttccgctaaataagcatggttggtcactaataattctgcttgttgttggcgtttggttaaccgacgcaagaaatcatcttgatagaatggcgcctgcggatcgagtgaggccacgccacggtgacgaatattaataaagaacggcgtttgataactggttaagttcaactcgtctaaatcaccggtgacggtttgggtcaaccagattaagattttcatctggagtaaccgcgttaaacgattcttatgtgggagttgcaacgataacgtaaaccggtgtaaatcgatatagtggcggggactcttaaccacttcggccaatactggtcggccaatcaacttctctaataacggccgtgcttgggttaatatctggtcttgtaatagcgtggttgacgtcgcaacgactaattttttcgtgctagacatcaaataactgtatggtaacaagtaccctaaggtcttccctaacccggtcgccgcttcaattagaatcggttgtggttgttcagattgataattatcggcgataaagtccatcatggtcgcttgggccttccgccattttaggtgcggttttaaaagcgcctttttagcggcttcatcgtgtgggtattcggcagcgtattgttcgcctggataaagcgtaaagtctgtcggttggtctttatgtaacgcaatgttttcgcgaatcagtaattctgggattaacggttgtgattgttcttgcatctggtcataaatggcggtaaacaaatcccccgtctggcgtaataaccccgttccgagttcactcaatttcgccaatgtgactagtggcaactcgcgtagacgggccatcagtttcaacaataatttagcggtgacgagggcgtcactgtcggcttgatgtggattatcgtgctcaatcgagagcaattgcgttaaatcctgcaaccgatagctaggcgcttccggcaaaatgatttgagccaattcaacggtatcaattccgtctaattccaatggttcttgcccgactcgggccaattcaccgttcaaaaagggtaaatcaaagttaatattatgggccacaaaaacagtacccgataatatttcaactaaggtcggcgctaaatcttcaaaaatcggtgcaaattccaattgatcagcactgatatgcgttaaatgttgaattttattaggaacatctcttaatggattaacatcttgggaaatcgtttgaatgattttcccattctgaacaagggcgcacccgaattgaataatgcgatccccgtctttaatattcgtgccggttgtctctaaatcgacaacggcgtatatcgtctctcgattcatgctgtcaccaatactttactgaattaattatgaacaattatacaatgccatttccaaattgaacagccaatcctgtttcgacaagactggtgacttgaagatgccattattctctaagatgattatacatggaactattccggattgaaagccggaaactgggtcgtggtctggattgaccatcaaaaaaggcaggattgctcccgcccacgtttgctattcaaaattaatctaatgccacaagctcaccaatcgatagtaaataaaggtattgatgggtcactggccgttttaaaatctgggctaaagctgcgctgtataaatttaattggccggcataccgggtcttaatttgtgcgatggctgtagtttgattttgcggatcaacataatcggttttgtaatcgaataagtaacaagcgtcattggtcaagacgtagccgtccataatcccatgaattaagaccgaatccgttggtgactcttgaatccctttgaaaagggtcgcagccggtaataagagtgagaacggcacttcccgtttaacttgcgtgggattcgctaaaataatctggcctaacgcactttcaaagaaggtcaaaatatgtgccacattaatcttagcagcaacggtggtggctaagatattggccaacactaattgatcaattaatgcttgcacactggccgtggtgattggcgcggtcaaatcgagttcttgcaacactaaatgcgtcgccgtcccaatctcagttgcggtcggttgcacgacggtttgcaggaactgcggtttagctaactgatcattaacgtaacggtgcgtttcttgggcttcctccgcggcaaacgttaattgacctaaactcaaattatccggatcatcaaataatcgtttgacttccgaaacggattgatacgccgtcgttgcagtcgcaacctgatctggatacgtgaaatcaagttgcgcgaccaccgcttgggcttgttcagtcgttaaatcaatcgtttgcagcgctttttgttgttgcttgccccaatcttgatctttttgcagactgcctggcaccacaccgaggccgatttgattgacaaaagtcagttcaaattcggtttggtcaccactcaacggtaagaacggttggtactggtcgacccagtctttggcctgtgaatggcgcattaaactcaatccaatccaatctagcaacgaattactagcgttgcggacgccgacgtctaagatcaatgaaccactattttgcgctttttgccattgttgcatcagttgtgcttggttatcacaactgccggcaataatcagtcgttgttccgctcgcgttaaagccacgtataatttccgcatttcttcagcgcgtaatttttgccgtttctgggcaacgatggccagttctggtagtgtcggcaccttcaaccgtttagcgttatctaaatagacaatcccgagtccggaatggtcatctaaaacgtagttctgccgtaaatcttgttcgttaaattgatgactggcatccatcaagaagacaactggaaattccaagcctttactcccgtgaatcgtcataacggcaatcgcatcttggtcttcaagactcgtcggttgggctaaatccttatcctgtttttggaggcgttcaataaattgaatgaattggaacaaccctttaaagccattttcttcataagtcgctgctcgttgatagagcgcgtgcaaattagcttgccgttgccgaccagctggcatcccaccgacgtaatccaagaaacccgtcttctgataaatcgtccaaatcagttcaaccaaggattgttgactcgcaatcgcccgtaagtcagttaacaactgttgaaagttggttaacttgcgcatcacttgttgaccgagttggccgaccttttggtcattaaaattcgcaataaaatcaaaaaccgcttgataataatcatcggttttatcgttaatccgaatcagggccaattcattttcattcaagccaacgattggcgaacgcaagacactgaccaacggaatatcttgattaggattatcaatcacttttaataatgacaacataatctgaatctcagtcgtttgaaaatagttttgggcgtcgttaatcacgactggtaagccaaaccgttggaaataatccagaatcagcaagttattactgcgcgtcggggtcaacaacacaatgtcttgatacgtgatcggccgcaattcttgcgttttgcgatcccaaatggtttcttgttggtcaatcatcgttttaatccgtttggcgaccgcaatgatttggccttcacttttatctaacgcgggaccactggctgcttcagctggtttggtttcgtataacaataattcggttggcgcagtcggaatctcgtccggataataggtcgcaccgtaggccaacttggcgttttcgtcataggccatctgacccaacttaacgtccataatttgttggaaaattaaattgacgaaatcgtcaatattacggcgtgaacggaaattttcagcgagaataatccgttcaccgtcctgatctggttgcgcaaaagcctcgtacttgccgataaacagactcggatccgctaatcggaacgcataaattgattgtttcacatccccaaccataaaaacattgcgaggttcagccgatgaaacagcttgaatgattgtttcttgcagttgattggtatcttggtattcatccactagaatctcactaaattgttgttgataatactgacgagcggcttgtgattccgccgtctcgctagtcagtattgctaaacaaaaatgttccaaatcaccgaaatctaatagatggcgccgtttcttttcagcttggaacgcgtggcgaaaagctaaggtcacttcaactaatttaccgactaactgtcctgctgatttttgaatggtcgttgtttgggcttcgtcaaagacaaaataggtgttcaataaattttcaagactctttttaacgtgatctaaatcatctttgagccggtctttggccacttgttcagcctcgtccaattttttagtccgcttggcgggtcccatctgcgcatccgtcaattgcattttccactgggcccacgttaattgcgctgaatcggtttgaatcgcggtcaataattgttgcgtggtttgaatttgttccgcatacacggttaacttctcactagtgatactcagttcggccgcttccttcaagtcttctaaacaagtactaatcgtgcgctgtaaagtcggtaaaatcgcctgttggaaatagtaactgcttgtaataccggcttccggaacggcatacggggtcgttaacgcgtgtagccaccctaatggatctggattggcattggcgaaattcaataaatcaaaaacaatcgtcgttaaaccgtcatcgttgcgatcgttcgaaaaattctgggctaaatcatagaataacgcatcatttttttcgtaatacccctcacgcacttgttgccagacccgatcggctaataatagtcgttccgcttcatcacttaataatcgaaaagccggatcgagtttaatcacgtaataaaaccgtttaatgacttgtaaacaaaacgcgtgtaaggtgctaatctgtgccgtggccactaaactcaattgttggcgtaagcgttgttgcaccgcgtgatcatccgttgctaaactcgtttcgcgtaaagcggtttgaatccgttgccgcatttcagaagcggccgcttcagtaaaggtgacgaccaacaattcgttaacgttggtccctttcagaattttttgaatgacgcgttcgacaagcaccgtcgttttaccagaaccggccgatgcagaaactaaaatatcgtgaccgctatgcgtgactgccgctgcttgggttggtgtaaattgccgtttactcatgttgatcaccttcatttttctcggttaatttttgcaaaatatctttggcttctaaagcttccagttgtcgataattattttccggtaacatcgcatcgaattggaagattgatttaaacggtgaccgcgttagagcgttggtccgatccggacgcatcattggattcaaggcgttggcccccgcaaaaatggcttgacccgcttctcgaatgagattttcattatgggcaatcaataactctaattcgttcatcgtgaccagttgcttggaactaaatttaccactcttcaatttgctaaaggcaaatagtggtgattgtccgctttctaacgccgtatctaaattggtcaacaattcttcatcgtttagaatcaggccgttatatttgaactgatccaataatagttgatcgagttggccttgttgtagttgcgccattttttgtttggttaactgttttaaggttaacgttgggttttggaggtgtaaataaaaagcccccgccggtttgacggccgtcttagccggtaaaatcgcggcttgatcttgcaaaacggtatccaaataggtcaacatttgtaacgcgaggccgtaataagcatcccggaaattgaaacggtgttgactcgatttataatcaacaatccctaagtaagcttgaccgttaatagtcaattgatcgattcgatcaatcttaccgcggactttaacttgatgattatcgggtaacgtaaagtctaacccctgcaaacctgtatcaatcccgacttgtccgaagagcacttccgtcgctaacggcgtcaattgcgtccgttgactttggtcacgcaacgctaaaccgacccgtttaatcgtctggctgagttgttggcgaatataccccatccgcgccgtcttggtgagaattttaaattcaggttgttcgtaggccgcttgtaataattggtcgactaacgtattaatctgcgcgtcatccaattgcggtaacgttaaggcttgctgttgaatccctttaataaattggtccattaattgatggtagaaatcgcccgtgttggctggtgttaattcaaaaacgggccgttcgttcaacttcaacccgtatttcaagaaataagcgtattgattttggtaaaattcttccaatttagaaatcgaggtatgaatcgtttgaccatataatccggtgacaatttccggcgtcaaagcaacgggttgattgcagtattgtaaactctgcaataattgttgcgttaaaaactgactcgctggcttttgaactaataattgataaaccgccaaccagtcgttcggaatcggtaactgctgttcttgtgcttgacgactgacttgaatcagatcacttaacaagctccgccacgaaccactaatcaccggttgcgtcgccatggctggttcggctaacacgtgctccgtacttaatttaaagtgttgttgaatccgttgaacgtacggtgatagttgataattagtcccatcaccactacttaatgggtaagtaaaataaaccgcttgttgactgcttaaaaaagctaagtagttcaaatagggttcgaattgcatctgcgattgactggcttcccctaagaattggtccgccgttaatccggtcaccagatttaaccggtcttgatcggttaagagtgcgctatcttcaacaatatccggcatcacttgatcagtcgaaccaatcataaacgtgatttgccgttgcttagtctggaccatccccgattccgataacacgacttgatcaagcgtcgatggaatctgggcgtattgcgcttgggcaaaaccggccgataaaagtttccagaaatcggtcacatcaaatggtctttcacccaataaggtcacgtattcatccagcatctgcatcaaggtcgtccaggtttgttctggtttaccagcttgggccacttggccgtctgctaacgcttgatcccgccacgccaagagttgttgatcgactccttgatcgactaaaaattgatataaaagctgcgcggcttggcgcccatttttcgccgcatctaaacgccggtaaaatggcggtaatgtctctttcacaaaatgacgaatccggttaattcgttcggttaaagcctcatcttgcgtggtccgcgtcccttcttgatacgaaccgaatcggtaaaattgccaatcgcgatccgctaaccaatcgtggccttcatagccactttttaagattaaattttcgcacaaatcaagatccgctctaaaatcggcgactgcttgatagtcacccgtcgccgtcttaggcaataataaggtggtcttcaatagcgccatgacatcttcgtaacgataatagtgatccttgaccgcaaataaggcttccaacattgaaacgagcggatgcgccgccatcgtttccggcaagtcgcagaaatacgggatttcatattcggttagaatcggcgtaatcatgttctgataaggcgttaaatgccgcgtcaaaattaagaaatcacgataccgatattgaccagtccgcactaattcacgaatttgacgcgccacaaagcggagttcactataacgattatcggctgccaccactttaatctgtttggcaacgtcacttgggggtgtcggtaaccgcccgaagttttgggaactgacccaataatcatcgagcgcttgtagactaggcgatacccgtttaacactagccacctggtccaataacaccggcacctgactattgcgtgcttgttggtaaagttgataataggtctgccccgcttgatagaaaaaatccaacgaatcgggtttttgattgacatacggttggtctaaaatgagcgccaccgatagatcagattgttgcatcaagactttcattaaagcctgttcttgggccgttaattgcgcaaagccttcgacgtagaaatgacaatcgtgcaaatcttggtgttgtaaataatcggctagcgcgtcaataatcgccgtattttcgataaattgtttttgcatcgctgcctcaaaagcggtcgcaataatggttaaatcgtgtaacttagccgttaattcaacttggcgttccgttaggttcgttgcaatctgggtgagatccgccggcgtgatgcaaccgactttcaattcgagtaattgtttggtgagttgtgcgacaaaccccgtttgattgacctcgccaccaaataagaccaattcgtcagcgtgttcttgcaacaagcggtaaaccaacatatttaacccggctgttgaaatccggggaatttgataatatggtgtattcttcatgaaataccaagctaatcgggtgaatgaaaaaacttggacttgtgaagaggcaacgtaattgacttcgtcaccttgtaattcttttaaaatcgacacttccgattcaaatttaatatggttcggtactaaataaaaaaaccgatcattcggtgttttttctaaagattgttttaaattagtgaccaatgtttgatgatgatcggcactaattcggcctagaataaactttaaactcacgactaccacccctttgcagctattttaccatacataggagtcacattatgtcatttccaaacagccggtagccgtcttctttaatttgcagtatagtagtaaagtaacgattagattcgtcaattcaatacgataggtgatatttatgcaaactggtgtgggcttaagtcacgctaaaattattttaatcggtgaacacgccgtcgtttacggtcagccagccatcgcactgcccatttttgcggtccaagcaaaagtcacggtgaccgtcgatgaacacttggctgaaccccaaattcaaagcgcctattatacgggcccactcagccaagctttcggtcaaatgaaaggcattcaatacttaattgaacaactctggcaacgattcaacgatcgccaagtcccgtttcaattaacgattgatagccaactgccccccgaacgcgggatgggctcctcggccgcgacggcgattgccattattcgcggattggccgattgttttaaccaaccaatcgatcatcagcaacttttaaaatttgccactctttctgaaaatatgattcacggtaaccccagtggcatcgacgcggccaccactggcgcaaccacgccactatggtacgttaaaggccaacaaccgcaaccgttacccatcaacttaaatggttacttggtaatcgctgacagtggtcaaaaaggccaaacggggacggccgttcaaagcgtccagaaccgcttattaggtaatccagcccaaacgcaaccagtgattgaccatcttggccaattaacgacggccgttgccgccaacattgcgcataatcagctcagtgaattaggtcaaaatctgaccgctgcacaaactgatttacaagcactcggtgtcagtaaccaacgactcgatcgtttaatcacaattgccaatcaagctggcagtctcggcactaaattaaccggtggtggtcgtggcggttgcatcattgccttagcggacactcaatcagcagccaactacttagcacaaaccttaacgaacgctggcgctattcaaacttggattcaagcactaccagatttacaaaactaacttaacaataattggggtaaacacttatggggcaatcagccactgccagagcacatacaaacattgcgttaattaaatattggggtaaacaaaatccggaactaattattccatacaacagcagtctttcgatgaccctcgaccatttctatacggatacaacggtcactttctctactgaattgacagcggatcaaatcctgttcaatcaagcacccgcagatgcggccaccaacattaagatgagccagtttctcgatttaattcgccaacaagcccatttcgacttacacgcgcggattgaaaccatcaatcacgtcccgaatgcggccggcttagcgtcttctgcttccggttacgccgcactagccgcggccgctagcaaagcggctggtcttgatttagatcggcgtacactttcccgactcgctcgtcgcggttctggttcagcgactcgttcaatttacggcggctttgtcgaatggcaacgtggcaccaacgataccgattcttttgccgtccctttacaagaaacggttgattgggacattcaaatgatcgcgattgtcttaaatgaccgtgaaaaagccgttgccagtcgcgctgggatggccaacgtcgttgcaacctcaccctactaccctagttgggtccagaccgctgaatccgcgatgccgaaaatgcgggccgcaatcattaagaaagatataaatttagtcggtcaattggccgaacaaagcgcgatgcaaatgcacgcaacaaccctaagcgcgacaccgcctttcacttattttgaaccagaaaccctccaagcgattcaagtcgtacagcagttgcgccaacagggtatttcttgctattatactatggacgctggtcccaacgtaaaagtgatttgtaccagccaagaaaccccccagattctaacagcgctcggacgttattttaaacccgaacagctcttagttgctaaacctgggccgggaattacagttcaacaatgacacacagcaacacttaaaatgactattaaagatgatatgtgaaaggttctgatggtttgataacggctaaagcacccggaaaactctacattgccggcgaatacgcggtagtagaaacaggttttccggctattattgtggcgctcaatcaatttgtaacagtttcaattgaagagagtcatgaatatggcagtattgtttcgaaacaataccaagaaaattctttattttggcaacgacaaggcgacgaaatggtttttgataatcgggataatcccttccattacattttgtcagcgattaaattaacggaacaatatgcgcgccaagttggtaaaacactgagtgtctaccacttacgggtcaacagcgatttagattccgaagacggtaaaaaatacggtttaggcagttcggctgccgtcaccgtcgccactgttaaagcgctctgcgcgttctatgatttacaattaagcaacgacgaactctataagctcgcttccatcgcccatttagacgttcagggcaatggttctttaggcgatatcgccgctagcgtctatggcggttgggtcgcttaccgatctttcgataaacaatggttggctcaagttcgatcaaccacgacgttaaaagagttgttaaaaatgccttggccagcactttcaatcgaattattaacgccaccggcagaattatcgctcctgattggttggacaggttcgccggcttcaacctcgcatttagtcgataaaattgccttggctaaaattgaaaaacaagccgcctatcaaaccttcttaaacgatagtaaagcttgtttagacgaaatgattactggtttccgccaacaagatttaacgaaaatccaaactgaattacgccataaccgggttttgttacaacagttagctaatttcagccacgtggccattgaaactcggattcttcaaaaaatggggaaactcgccgaagaaatcggtggcgcagcgaaaacatctggcgctggtggcggtgattgcgggattgtgattatcgatcgcgccatcgagaccgcgccccttttccaaaaatggcacgacaatcaaattgaacgattgaacctcgccgttcatctcgttgactaggagtttaaacaatggttagacctaaacaatccatccaatcacaccggaaagatgaacatgtctttttggctgaaaaatttcatgaagaaatgcgtcaaaatgatttcgacggtttgcgttttattcaccaaagcttaccagaaattgctattgccgacgtcgatattagtacgcagtttggtcccaatcactgggacagccccttctacatcaacgggatgaccggtggcagccaacaaactaagaaaattaacgcccagctcgcccaagttgcccagattactggtttaccgatggcgactggttcgcaatccgttgcggttaaagatcccagtctagtcgatacgtttacaattattcgtgagtacaatccggaaggttttgtcctcggtaatattggtgctggcaatgatttagccgtggcccaacaagccgtcgcgatgaccaacgccaatgcgttagaaatccacgtcaatacgacccaagaaatcgtcatgcccgaaggtgatcgccaattctactggctcgatcaaattgctgagattgtcgaccaactgacggtccccgtcatcgtcaaagaagtcggctttgggatgagcgctgaaacgatggcgcaactccaatccattggggtccaagcgattgatatttccggccgtggcggcaccaacttcgtcacgattgaaaatgaacgccgtcacgataaagcctacgactatctcgaaggctggggccaatcaaccgttgaatcactctttgaatcgcaaggctttcaaaacgacctgacgattctcgcttctggcggtattcgtaatccgttagacgtgattaaagcgttacgcctcggtgcgacggccgtcggggtttccggtcaattcttacacatgattctaaaagatggccccacggtgacagctgaaaagcttttagcatggcaagcccaaattcaagcgattatggccatgctcggggtacacaacctgaccgaactcaaacaagccccactaatcgtatcacccgaattacgccactatctaaatgaacgccatttaacgttataaaccatcaaaaaagccaatacttaattctcgattgagaattaagtattggctttttaagttattgaaatcgtaagttatgacggtttaggtcatggctaacgatttgtagctaagcacaggaacctgtgcacagaagcacgttatctcaatcatgcgatctataaaagtgcaataaaaaacgggccctcgcagaatgaatggcgagggcccgtttttcatttttatgatgagattaatgattaaaataatattgggcttttaaattttggatggttaacatgactagtaaactaatgacgtagagggttgagatgaaaatcatcaccatcatcattgaatagtgatcgagtaaccaaccaatcataacgctggaaaaaccaccgatgcagcgtccgacgttcatgatgacgttgttggccgttgcccggacttcagtgggatataagcggctaacaactgcgccgtagccggcgaacattccatttgagaagtaaccgactaatgcgccgactaagagcaaggtcggcatgtctttgggtaaggtcaaaatataaacacctaaggctgaagcgactaagaagaggccaaaagcgatgcggggcccgatgcggtctagaatccaaccgaaagttagcatcccggctgacatgccgacaatcgtggctaacatccaagtggaggaaccagcaacgctaaggtgcaattgttgttgcatcatagtcggtagccaattcattaagccgaagtaaccggcaatttggacgacggccatcaccattagtgcgactgtttggtaagctaactgaggtgttttaaacaacgctttgatttggcctttaggttgcgtagtccgattagtgaaggtggtgctttcaactaaatggcggcgaatgaagaaggtgatgacaacggggagtaatccgaataagaaaagagcgtgccaaccgaattggggtaaaatccaagcggctaaaagtgcggccaagatagcgccgatttggccagcaaccccaacgaatgacgaaacacgaccgagttgtttcttggggaaactttcggcgagaacggtcataccgataccgtattcaccgccagcaccaatcccagcaaggaatcgacaaagataaattaaggggagactgttggcccaaaagagggcggccgttgcgaatgcgaagataaagatagtataggtaaaggtcttaatgcgcccgacgcgatcggctaaaacgccaaaaaaaacgccacctaacaacatcccgatattagtaatcgttgcaatcaaacccgcctgtgtgccgctgagatgtaaatcagcgataatcgacgatagcgcgaaagacaagaacatgacgtccatgttttcgagtccaaagcccgccgttgttgatgcgacgaccttagactggtagcttgataaatgatgttggctgtgtgccgtgataggtttcatattcaattttcctccaaaaaggccgctctctgacggcccttattttgttccaagtaagcttagcacaaaagaggcgtgaggcgcaagtgatgatttggcgtgtaagcggttaaaattaaaggagcaaggcttgaccaagtcgacgtaaccctttaaaattagggagaacaatataattagggaggtcataatatgacagatgtcaaacgcaaaaagtttacctttccaagtgcctatacggtcattttgttagtgctcttattggtgatgattttaacctattttatgccggctgggaaatatgcaagtttgcaatacaatactgatagcaatcattttacaattacctcgccaaccggtaaaaccaaatctgaaccggcaactcaagcgacgttaaagaagtataacgttaatacgagtttagcgaaattcaaggatggatcggtgtataagccggttgctattccaaatacgtaccagaaattaaagaaagctaaaaacgggctctttggggcagtgacacaatttttaaatgcgccaattcaaggcctagctgaaacgattgatatcatcacgttcgtcctaattctaggcgggatcgtgggggtcgtcaataaaaccggtgcgttcgcggccggaatggcgagtttgtcagttcgattgaaaggtaaagaagcttggttaatcgtgattgtgacgagtctgatttctttaggcgggaccacttttggtttagccgaagaaacgattgccttttatccgattcttgtgccgatttttatggcggcgggttatgatgcgatcgtcgcgattgcggcgatttatctcggtagttcgattgggacgatggcttcgacggtcaatccgttttccgtcgtaatcgcctcgaatacggccggaattagtttcgccgatgggatgggtatgcggattgtgatgctggtattaggcacggccatctgtattttctacacaattcggtatgctgaaaaagttaaaaaggatccaaccaagtcattgatttatgctcaaaaagcagaattagaagcgcatttcttaggtgatcaagatagtaatgaagtgcctaagtttgattttcgtaagaaattaatgttactgattttcgcagcgggctttgtggtcatggttgtcggcgttaaagagtgggggtggatgttcagcgagatttcgatgctcttcttaggcattactttcatcttagcctttgtttcgggtctctcggaaagtgatttcgttggcgagtttgtgaccggcgcgtctgatttattaggggtggcattggtcattgcgttagcccgtggggtgacgattattatggaacaagctcaaattagcgatacattattgttctggctgagcaacggtgtatcacatatgagtggggttctcttctcaacggtgatgttcttcgtcttcatcttgctcggattctttatcccatcaagttctggattggccgtcttatcgatgccaatcatggcaccattagccgatgttgtcggcgttaatcgcgatgtgattatcagtgcctataactggggtcaaggaattatgtcattcatcacaccaactggtttggtcttggcatcgttagcgatggtccacgtgacgtttgataaatggttgaaatttgtgatgccgttaatgataacaattggtattttggcaattgtgttattgggtgtcagtgtttatctataaagttaaaaataaaaggctaatccatgatggattggcctttttgtgtgaagacatgcttcccaagccaacttcttccgtctagctacaaaaagaagtgtgttaccaaaaatcggtaacacacttcttttttaggctatactcagaagctaaccggcttggtcaacactctgatttaaaacgtgcttttagttgcaacaacttacgcttaatctaaaaaccccgataatcttaagaacgagattaccggagatttataattaatacgcagttgctgaccacaactaaaaccactctgatttaaaacgtgctttcactcacaggttcttgtgcttagcgacgtctggcaaacaaaggctaaaaacagcctttattcaccagactaggctaatgctcagaacctacccgtgagttgcagcaacttagtttgaaaacgtgttaacttgagcaaacttttccgcttaacgacagaaggacaatcatagttaaaatcaactataattgtccttcttaggttatgctcaaagttttaacgcccaagttagcactctgatcgaaaacgtgttaacttcaacaatcttttgcgtttaactacaaaatcagccacacgattaaacatctaatcatgtggctgatttttaggttaatccgcaaagactaaccgtttaagttaacactctgatttaatagaccttaaattctgttagtggccagtagcgtagtttgacgacgccttggatgccgttgtattttttcgaattgtcgctgatgaaaccgacagctttgtagcggctgtcttttgagaccgttcggttatcacccatcacgaaataatggttggccggcacggtactgcggcctaataaatctttcaggtcaaatgacgaatcggttgaattcggtttgacggtgaagtaattagaaccggcgagataggttgaataatcagccttatattcttttaaataaggttcgctaactttcttattgttaacgtagagttgatctttgtcgaagcggacggtatcgcctggtaagccaatgacccgtttgatgtagaattcaccgggggcatcaggggctttcaagatgacgacgtcgccgcgttcaactttcgtgtgacgtaaagcaattacccgatcgtattgagaaaaattaggctgcattgaaggcccaaaaatttgctcgttggcaatcacaaaggtgagcagcaactgagcaatcccaatcattacagcggataataatatgatttgtaagacagatttccagaattcttttgttttagctgacatttccgcacatccttaataagtcaataatctcattgtactacaactaatcaattgatgacaacggaattgtatagctgattaactaattaacgttgcatacggtggaaaccttgtagcgactgacgatcggcttgaacagttgtgcttggttgatgagtgggtagatagtggcccaacattaaataactaatacccaaaatcccaatgagtggcaccatccaacttgctattttacgtaacatattcaagacccctttatttgatattaagtccattttaacgggcattgcacatcagcgccattgaatgaactaacgaatcggcaactggtgtgacaaagttgttatgtaattgataaatcataaacagaatttatcaaggcaacggtgttcgtggtatactaagaacaatattgcttaagaggtgaacggaatgccaacaattcaatcaaaatttacaccgattttattaggaagcgactttaacgtttatgggatggcgcgttcgttttatgaactaacgggaaaaccagtccaagcctacgcaggtgctgaactagcaccgacccgttatactaaaattgtcgatgttgaaatcgttccagggttcagtgaagatcccgtttttattgaaaaaatgcgagaattaattttaacgtaccaaaaacatgatgaacccgtgattttaatcggttgtggggacggttatgcagaattaatcgctaaacataaggtagaactacaagcggcctttgtttgtccctatatcgattacgatttattgaaacagttgaataacaaagaaaacttttatcaagtttgcgaagaatatgatttaccttaccctaaaaccaaaacgattacgcacgagatggtaaccgcaggacaagtaacgcaaccatttggttatccagtcgcattgaaaccagcgaattcagttgaatggttagatgtgcattttgaaggccgtaaaaaggcgttccgaattcaatcacaggttgaatttgatgcgattattcaaaaaatttacgctagtggttatacgtcagatctaattcttcaagatttcattccgggtgatgacagtcggatgcgcgtgttaaacgcctacgtggatcaaaatcaccaagtgaagatgatgtgtttgggtcatcctttattggaagatccagcgccagccgcgattgggaattacgtggcgattatccctgaatataatgaaactatttatcatcagattcaaaccttcttagaagcgattggttttacggggtacgctaattttgatatgaaatttgacgaacgggatcaaaccttcaagttatttgaaatcaatttacggcaaggtcgcagtagtttctttgtcacgttgaacggttataatttagcgcaatgggtcgttcaagattacgtgacgggtgaattaaaggaccaaccaaccgtttatggtaatcaagatgatagtcaagcagctttatggttaggcgtgtctgttgacgtctttaagaaatatacgcgggataatgcggacaaagatcgcgcattagcgttaattaaacaaggccgctacggcacgactttccaatatgccaaggataataacgttaaacgttggttattgacgaaatggatgttgcataattatcgtaagaattttgcacgttattttaaagaaaacaaagggtaattgatgatgaaacaattttttacagtgcttggcgggatgggaacggccgcgactgaaagttacattcggttattaaatcagcggacaccatctaaaaaagatcaagatttcttggattatatcgtggtcaatcatgcgacgattcctgatcgttcgacttatttaatggaccatacgcaacctaatccagctccttacttattagaagatattcaacaacaaagcttattgaagccggcttttttcgtgattgcttgtaatacagcgcattatttctatgatgagttgcaagcagcggcttcagcaccaatcgtgcacatgccccgtgaaacggttaagagtattcaaacgacttatccaaccgcaaaacggattggtattctagggactaaagggaccgtcactgacggtatttacgaccaggagttggcgaccgttggttacaagattgttaaaccaagcgaagcattgcaagagcggacgatggatttaatttttaacgacatcaaaggtcaagcgaagatgagtggtgctaaatatcacgccattttagaaacgatgatcactgaaggcgattgtgatgcggtcattttaggctgtactgaattatcattagcgcaagaatgggcaccggatcacacttttccagtcgttgattcacaatcagttttagttgatcggtcgattgaattggcgttgaagttacgagaaaagtgagtttgatgaatgatggcaaaattagtaattgttagacatggtgaaagtttggccaaccaattaaacacttacacgggttggtcagatgtaccactgacggataaaggtcgtttggaagcccaccaagttgggcaacaacttcaagcgactgggattcaatttgcccaagtccatacatcgctattaaaacgggcgattttaactagctatatcattttggaagaaatggatcaattagccattccaatgaccaagagttggcgattaaacgaacgacattacggcgctttgcgggggttgaataaagaaaccacgcgaagtgtttttggtgtggcgcaagtcgcacggtggcgccggagctatacagctattccaccattacttacgcaggtgtcgcaggaacggcgctatcgattagtcccactagcaagtcggccacggggcgaaagtttggcccaagcgacccaacgattattgccgtattggcaagatcaaattgtaccgggattaagacaaggtcgtgatcagttagtggttgcgcatgggtcgacattgcgggcgctgattaaagtcattgagcagatctcagatcaagcaatcgatggggttgaagtcgctaacggggaggcattgtactatcaatttgatgcaacactccaattgattgagaaaggacgtttaggctaaagttgatgatgaaacagaaaataacaatcgcgattctgatcgttggactatttgttttgggaattggtgcaacggcccaccactaccgacaccaattggtggtgcaagcaggtcagtctaatcaacgattaaaacaagtgcaacaacaattacaaacaactcaaaagcaattggcagagcaagtggctaaagataatcattccgcaatcgatactcgcaagacgaaccagttaacgggtgtccaacaacaagtattacagaaaaaattaacggatagtcattttagtggcacgattttattagttaaaaataaccggattatctatcaagacggtcgcggttatgcgaattatgaacaacaaaaactaattacaccgcaaacgacgtatcagattgcctcggtccagaaatcattgacggctgcacttgtgatgaaagcggtcgaagcgggtcaattaaaattaacggataagattggccaatattacccacaaattaaagagggtcagaaaatcaccattcaaatgatgttggacatgcagtcgggattgattgaaactaaggcgccgactgttgatttgacggagcaacaacgattcgcgtttgcgtttgatcatttgaaagttcaaaatattggcaaacatttctatgcgccagtgaactatttattattaacgggtgttttagaaaaggtgacccatcaatcgtatcaacaactatttgaaaaacaagtgagtgaaccgctggcgttgacgtcatttggatttatgccaaatagtattgccggtcagcaagctgtttcgtataccgttgagaataatttttatggtgaagctgttccggtgcccatttttacgtatacccgggaaattggcacggggaatatgtacgccacggccagtagcttatttcaagttgaacaggcaattgtgcaggggcggattatcagtaaaaatagtttacatcaattacggcatacgcaaactggtagttacagtggtggcgtgtataattggccaacttattttacgagtcatggggttgaatcaggttacgaaagtgccattcaaatcagtcaagacggccaatcaggcgttgttctgttgtccaatcaatataaggtcaaaccagtccccttggttgggttgacgaagtcgctgtaccaacaattctgtgaaacgcaaacaaaagcataagcaacaaaacaaagacacgctagtccaattcgggctagcgtgtctttgtttgattgatgattaggtgattattctaaatagtcgtttttgagttgttcaatttcggttggtttcaacgccatcgcttgggttagataattagccatgctaccgaaatgttggtcaatcacatcatagacgtggttgatactttcaatcgagatggcttgcgcgttcatcgcggccacttgcgcatcattgctgttgattcgttttggtgttgcagtgtctaatccgaggacttgattcgataataagaaatcattggtaatcgtttcacggtcgacgcctaaagcactcaagattaataaagtgccgacaccagttcggtctttgccggccgaacaatggtataaaacggcgccatccgtgtcatgattatttaataagacggttaatagatcacgataggcggcttgggcgtgcgcgtcgaggactaattgttgatacattttgtccatacttgataattcgggttctgcggatgattgatgaccgaatagtcgaccgaataaacccgctttgggcgttggttcggttgattgatcagtaaatgggaagacggataaacggtggtaagtcacgaattgttcatcaaacggatcgggtgcgactttaatttcgtggcgtgatcgaaaatcaacgtcgaataagatgccatattgaatcaaacgttggatatcatcattggtcagtgcgtttaaactaccggagcgtaataatttatgccatttaatggtacgaccgtccgctgttggatagccgccgagttcgcgcagattgttgctacgggtgagttctaaaacgcgttgatgctcttgcatactaatcagtcctttgctgttttattctaagtactattgtataacgaagttgtctaaaaaacagcaacagtttaaacgttcggtttctgctaattaaagggacctacctaaaattaatttttaataagagctaattgacgtatcagtaaaaatttgctatagttttaacaattttaaaataactaattttagcggtaaagcgaacaattggttagcttttcaacacttaagttcatgaatggaggaagatttatgtctgcatgggaaacaaagtttgcgaaaaaagggtttacgttcgatgatgtgttattggtccccgctgaaagtcacgtattacccaacgaggttgaccttggtgttcaattagccaagaacattaagctgcaaacaccgatcatgagtgcgagcatggataccgttaccgaagcaccaatggcgattgcgatggcccgtcaaggtgggctaggtgtcgttcataagaacatgagtattgaacgtcaagctgacgaagtgttaaaagttaaacgttcagaaaatggggtcattattgatccgttttatttaacggctgacaaaccggttagtgcggcggatgatttgatgcgtaaatatcggattagcggggtgcccattgtctctaatctagatgatttgaaattagtcggcattatcaccaaccgggatttacgctttatcactgatttctctgctgaaatcgggactgtgatgacgcgtgagaatttagtgactgcgcctgctggaacttcattagttgaagctgaacaaatcctccaacaaaatcggatcgaaaagttaccattggtcggtgatgatggtcggctagcgggtttaatcacgattaaagatattgaaaaagtacaagaatttccgaatgcggctaaagatcaatacggtcgtttattagtggctgccgcagttggtgtcacgagtgatacgttcgatcgggccgaagcgttgttaaaagccggggccgatgcgattattatcgatacggcgcatggtcattcagccggcgtcttacgcaagattaccgaaattcgtgctaagttccctgaagcgactttaattgccggcaacgtggcaaccgctgaaggcacccgtgcattgtacgatgctggtgttgatgtggttaaagttgggattggccctggttcaatctgtacgactcggattgtggccggtgttggggtccctcaattaaccgcaatttacgatgcggcaagtgtcgcccgtgaatatggtaagacgattattgccgatggtgggattaaatattctggcgatatcgtcaaagcactagcggctggtggtaacgccgtgatgctgggtagtatgctagctgggacggatgaagcgcctggtgaatttgaaatctatcaaggtcgtcgttttaaaacgtatcgtggcatgggcagcttggctgcgatgtcacacggttcttcagatcgttacttccaaagtggcgttaacgaagccaataaactagtcccagaaggaatcgaagggcgtgttgcggctaaaggtgctttgggcgatgtcatctatcaattattaggtggtttacgttcagggatgggttacgtcggtgcggctaacttgatggcgttacaagatgatgcgcaatttatccaaatctcaaatgccggtttaacggaatcacatccgcatgatgtccaaatcactaaagaagcgcctaactactcagcgcgttaaacgttgagttagcagttagtcttaaaatttgcagtgtcggaatcattaacgttaaaatagcagtaatccgttctcgattaggagaacggattttttggttaacaattgcggatttaaagaattctttaaccctaaaaaccgaatagtttgttacaatgatagcgaatcactcgaaatgagtttaaattaaaacgaggtgaactaaatgatgaaaattttaattgttgatgatgataaagaaattgttgaattattgagtatttacgttaaaaatgaaggttacgatccaatccaagcgtttaccggtaaagaagctttaacgaagattgcgactaacccggatattgatttaatgattctagatattatgatgcctaatatgagtgggattgaagtcattaaagcggtgcgcaaggattcgcaagtgccgattattgtcgtctcagccaaaacaaccgatatggataaaattcaagggttgattaccggcgcggatgattacgtttcgaagccttttaatccgcttgaagtcatggcgcgggttaaatcacttttgcgtcggagtcaacaacacgtcacgactgaagtcccagatattttggaagtcgggccgttggtgattaaacgcgattcacacgaagtcacgacgattgcgggcaaacaaattcaattgactgcactcgaattcgggattctctatctattggcgagccatcccaaccgggtcttttcggcggacgatatttttgaacgggtctggaaacaagaaagtattgtatcggcgaagacggtcatggtccacgtgagtcatttgcgcgataagattgaagaagcgactgacggtgaaaaagtgattgaaaccgtctggggcgttggttacaaggtcgaggtctaatggacgaacaacaacataatcaacccttaaaaaaagttgccttaacgggtaaagaaaaaagtgaattatttgccgaaggggtcattacagttattttattattactgttaaacctctcgattatggtgcttttacaacaagcgattatcaccaacccgcaattacggggtggtgtttggatgattaaaaatgcgatcaccatcggaccgaatgaatggcatatttggagttggcagaattggtttgtcgttctaatggcggtggccgatgtgctagtcgtctattggcggctgattcggcgttaccatcaaatgcagatgtggcacgtgattggtgaactccatttcatcgcggatggccatttagaacatcggattaatttgcgggtcaatcgcgatttacaacgcgtgattgatagtgtgaatacgctagttgatagtacggtccggtcgatggacgaagaacgcaagattgaaaagagtaaagatgaactgattacgaacgtcagccatgatttacggacaccgttaacttcgattatcggttatttaggtttaattgaggatcagcaatatcaaacacgcgaagaattaactaagtatacccacacggcttacgtgaaagcccaacagatgaaagtgttagtcgaagatttattcgaatacactaaggttcgccaaacctcgacaccgattgctaagaccacttttgatatggaacagatgttggaacaattggcggcaagtttcgaattagaagcgcagaaaaaagggatgcaaattaacgtgcaatgtcatccggcgcccttaatgatggaagctgatactgaaaaattaggacgggtttttaataatttgctagccaatgccttgaaatatggtaaaggcgctaagcggattacgcttgaggctgaaaaagttggccaagaagcgattattaaggtttcaaatgatggccagcaaatcccgagtgactcgttgagtcagttattcgatcgtttctaccgggttgaagcatcgcgttcccaagaaacgggcggaacagggttaggcttagcgattacgcagagtattgtggcgttacatggcgggtatatttatgcggattcaacgccagaattaaccagttttgtgatacacttacctttaaagttaggtcagccagttaaagctgatactcaccatagtcaggagtaagattgtgtttaaaaaaataatccagtatctcatggttggtctattagtcggggcaccagccagtcttgccgtccaacccacgattagtcaggccgcaacaacgacaccggcgacgttaccaacagcaccccaaattgatgcgagcgccgcaattgcggtcgatgccaagtctggtcaagttttatttgaacaaaatgcggaccaagcgctgccgattgcatcgatgactaaaatgattacggcctacattgtgctgactcagattaaacagggtaaattgaagtgggagcagacgattaaaccggataccacgatttacaagttgagccaagacaaagatttaaccaacgtcccattgcaggctgaggggcaatatacggtgcgcgaattgtaccaggcaatgatgattgcttcagccaatgacgctgcgatgatgttggccaatgcaattgctggttcgcaaaaggacttcgtcgatttgatgcgccaacaggttagtcaatggggcatcacggatgccaagttatattccgtttcgggattgaacaacgcctatttaacggatgctatgtattcgggcagtgcgaaagatgccgaaaatgaaatgagtgcggtcgatatggcgattgttgctcaaaaattattggctgattttcctgatgtattggacacgaccaagcaagcgaccttcacgtttggaccgcaaacgagcgatgaaactaaactaacgacctttaatctaatgttacccggtcaaaagaatgcgccgaccgattacgtcgtggacggattgaaaaccggcacaaccgataaagccggcgattgtttcaccggaacggcgaccaaagatggtcaacggattatcacggtcgttatgcacgctaacgggagtgataccggtcgtcgatttatcgaaacgggtaagttaatgactgatgtttttgataattgggcaccacagacgttagcaaaatcagcgactagtattgcgggttatcaaaatgcgaccgttaaatacggtcgacaagcgacggtgccgttagtgaccaaccaaacgataacgctctggttacctaaaggtgcgacgagcaagaacgttgattggcagtaccaagccgttaaaggtggtaacaagcgccaagtccaagcgccgattaaaaagggcaccacggttgggcaagtgagtccgcaattggcgggcaccacaacgcgcttcttaaaaacgcaaccgacttattcattaaagactcaaaaagctgatccaaaggctaatgtttttgtcttaattgggatgggcgttaaagagtttttcaccgatttattttaattagaaatcagacgcgccgtcaatctcatttaaggttgatggcgtgttttaatttggccggaaaatggccgattatgctatacttaattcaattcacagtgatccactaggaggattcaaatggctttaacactcgatgcatgtatattacttttgaaagaacatcatttattaaaaagcgtggctttaaatgatccagccactttaaatatgaccgcaattgcgtacgactccagaaaagtaacggaagagaccttgtttttctgcaagggcaatttccgacccgtatttttaaccaatgctaaggaacaaggggcggtcacgtacgtcgccgaacaaccaatttcagaaggcaacggcatgaacgcgttaatcgtcaccaacgttcaaaaggcgatggcgattttatcggcggccttttatgattatccgcaagatgatttattcatcattgcttataccggcacgaaggggaaaaccacggcggcctatttcacgcaagccattttacaagaagccacgattcaaaaaacagcgttgttctcaacgattgatcgcgtattaggaccaaaaccagaacaacgcttcaaatcggatttaacgacgccggaaagtttggatttatttcacgatatgcgtgaagctgtcgaaaatgggatgacccatttagtcatggaagtctcatcacaagcgtacaagaaaaaccgtgtgtacgggttaacttacgatgttggcttcttcttaaacatctcgccagatcacgttggtccgaacgaacatccggattttgccgattatttacactgtaaattacagttattagtcaattcacggcgttgtgtgatcaatgcgcagacgcagaattttgccgatgtttatgcggccgcgcaagccaccaccaatccgtcagacatttatctatttgcggagacggcttatcaggcgaccgaagccgttgacattgatttccgatttgaaaacctagaaatgagtttggccgacagtcgctttaaagtgacagcggtctctgatcgcgctaacgcgttaggcgtggcgggggattatcaattgcgattgattggtgattttaatgaaagtaacgcaacagcggccattatcggatccgcgctagcgggcgctagcttaaatcaagcgcaacaagggattcgtcaattacaaattcctggccggatggagaccttagcggtacctaaccacggtcaagtctatgtcgattacgcgcacaattacgccagtatgaaggcgctattgagctttttacaaaaagaatatcacaattctaagttgatcgtagttgttgggagtcccggtgataaaggcgtttcacgtcgggcgggctttgcccaagtcctcaatgaatatgcaaatcaggccatcttaacgaccgatgatcccgggtatgaagatccggccgcgattgccgccgagattcggaccgggattgacgaagcgaaagtccaaacaacggtcgaactcgatcgggcgactgcgattgaacaagcgattgaagcgagtcaacccggtgaaatcgtggtgctggcggctaaaggtgcggatgcttaccaaaaagtgcgcggggttgatacgccgtatgcgactgatatggtgattgcaaagcaagtcgctgaacgtctcacaaaacaggttaactaatctttagtgaacaattttaaagaattcgtaaatctaagtaaactgtgttgcattaaaacgcaactatccttaaaataaaggtgtagtaaacggttgcgaaggaggagttatgatgaaaagagtcgcattatttgggacagttttaatgacggggttattattgggggcttgtagccaacagacagcgagtcaatcaagtgataacacggatcaaagctccgtatccgttagtttaaaagagcgtgaaagtcgtgtggctaaacgtgaaaaacaagtgtcaaaagattctagtagcttagcgaccagcgccagccaatcggcggaaacgacgtcatctacgagtgatcagtcaagtgtcgcgacaagtaccagcgctgcatcagtgacgagtgacaaaatgagtcaaacaacaactgctagtcaatcagcacaaaatgcgacgagtagtagtagcgcccaaaacacaaatccaacaacaccaacccaaccgacaacggtggatggtaatcaagccattaaattagtgattcaacaagcggggcaacaatttggtcaatcagcctcttatttaaataacggattaatcacgcgtggtggtcaacaaggttatttaattaatatctacgcaccaaatgaagattcaccaagagcgggatactttgtaactcaaacgggtcaagttgaacaaatctggtaatcatgtcgaataacttagtcgagcgtaaaaatgctcggcttttttgatgccaatcattttcagaaaacaattgacaaaataacggattcgtgtaaaataatctaagtaaaacgtaatagttactatttaatgaatggagtattttatgcataagaaacgttttgggagtctcgtattgattagcgcgttaatttggttaatggtcggttgtgcaaaaccacaaaccaatagtgagcagattcaagtcgtttcatcgttggatttttatggtgaagcggcccaagcggtattgggccaacacggccaagtgacctcgattatcaatagcccgagtctagacccacattcgtacgaaccaacaacgaaggatgccaaagcggttgcccaagcggacgtggtgattgaaaatggcttaggttacgatcaatggttggccaaagtggtggccggttcgaattctaaaacgcaaaaagtcattcagattaaccagttaatgaaccgaactgacggtgctaatgaacatttatggtatgatttaaagaccatgccgaagttaacgcggcagttaatcaaacaatttagtcaaatcgatccaactcataaaaagacgtatcaaaaaaatggccaagtctatctcgataaattaacgcagttgcaaacgcaattggatggactaaaagcccaagcgaaggggcaaaaagtcgccgtcagcgaaccggttttcaattacgcattaacggcgatgggttatcaagtggccaatagtcattttgctaaagcgattgaagatggcaccgacccatcacccaaggatattgcgcagatgcgccgcttgatcaagcaacacgagattgcttttctagtggtcaataaacaagaagaaagtcccgtgattcaacagatgcacgaacttgccaaggcggaaaaagtgccggtggtccaagtcaccgaaacattacccgctaaagaaacttacttaacgtggatgcaacaacaatttaaagcagttagaaaggctcaaaattcataatgacagaattagtcaaagcgcagcagctagggattacgttcggtaatcgagcggttttaaaggatttaaactttgaacttgaacgcggtagtatgatgagtttaatcggcccgaacggggttggtaaaacgaccttagtccgcttattgattgggacgttgcaaccgaccgttggtcaattggtctttacgccagaacgacaagcattacacattggctacgtgccacagtttcgcaatctagaagcggaataccctttatcgattcggagttttgtggggttaaatcaattaaaaagtcatttaccatggcacactaaatctgaaaaacaagcgttgaaccagattttggcgcaaacgcatctaaccgatttacagaaaaccacactggggaatgcttcgggtggcgagaaacaaaaagcatatttggcgcaagccttaattagcaaacccgatttgttgattctagatgaatcgaccgccagtttagacattgagaccaaagaagaagtgatgtcgctcgttgctgaattgaataaagaacagggcatcaccgttatttttgtcactcatgatttggaactggcacgtaaatacactgatcaatacctcttgttaaaacgcggtcagtacgaaatgggaccaattgctcaattggatccaaacttagaattagattgatgtggaggacgattaagtgttaacttttgattttatgcggcacgcgtttgtcgccagtacgtttattgcgattacttgtggactgattggggtgtttgtggttgcccggaatatgtcttttctcgcccatacactagccgaaattggttttgccggcgcctcgtttggggttttcttaggaatcgcaccgttaaacgggatgttattattcacgatgctcagttcagtgacaatcggtcaaatgagcgctaaagaatcgcggcgtgaagcatcgattagtgccatatcgagtctgtttatcggtttaggcattttattcttgtcgctatcgaaccaaaacgccagttatgcaaccaacattttattcggttcgattattgggattagtttagccgatgtctatcagttgatggcgttgtcggcggtgattgtgattgggattttactcttttatcgctatttagtgtttgattcatacgatccaattggcgcgcaagcccaagggttaaaaacgaatctgatttcaatttatttcttaatattattagccatcagcgttagtatcgcggctcaaattgtcggttcactattagtcttcatcttagtgactttaccagcctttatcgcgaaatatctcgctaaaagtgtacctgcgatgttagctatttcagtcggggcggccttattaggcgtctggttagggttgtggttaggctacatcaccaattggccagtcacattctttatcgcaacgattgaatttggcttctatttcatggcattactgtaccatcgacatgttagtagataaaaaatgagcgctgactgcacacgggtaagctctgagcattagcctagttccgtgaataaagtccgggttgtggactttgtttgcgaaacgtagctaagcggaggagcttgtgtgcagaagcgtgttttaacgacagagcgctgattcagcaactcaaaaagagccccagacaaatgactgtctggggctcttttcaagttaatcaacgagtgtcgttaataagttttccagttggtctaaacgttgttcgaaaacagtgaaagcctggtctaaataagtggcattcgtcatatcgacgccggatttttgcataatcgcaattgggtagtcggaactaccggcttttaaataggtcaggtaacgatctaaagccccatcttcttgattgataataccgctagccaaagtggtggccgcggcaaaaccggtcgcatattgataaacataatagttcatgtagaaatggggaatgcgcgtccattctaaagcaatttcgggatcgcgcgcgactgatggtccgtaataacgggcgttcaaatcagcgtaataatcggacatgaagctagccgttagtggtttgccagcggctgctgattcatggatgaaatgttcgaattcagcaaattgggtctgacggaagatagttcctttgaaaccgtcaaggtagtagttcagtaagtaagcttggaccttggggtcggtttgggtttttaagagatagtccgttaacaagttttcgttggtcgtcgatgcaatttcggcgacgaaaatcggataatcgccgtagaggtaaggttggttttgacgagtcaacgcactgtgtacgctatggccggtttcatgaaccagtgtgtaaagattgttgaggtcatcttgccagtttaataggataaagggtttcgtatcataggcgccaccggaataagcgccactgcgtttacctaaattttcaacgacgtcaatttggcgcgttgtgaaaatttctttgacgattgtttggtaatcaggccccaggattttaagcgcttcgagggcggtcgcttgggcttgttcgtaattgtaagttaaagcgggtttgcccaataacggcgtatataaatcatacatgtgtaattcgggtaatttcagcatcttttggcgtaattgaatatagcggtggagaagtggtaaatggcgattaacttcagtgaccaatgtcgtataaaccgtttcggggatggcctttggtgcgagcgctgcttggcgtgcattatcgtagtggtggacttgcgctaaataattgtggcctttaatttcggccgctaaagtgctggcaaaagtatttttaaattggccatacgtttgatacaatgccgtaaaggcttcttgacggacggtttggttagtggattgcaataactggctgtaaacgccgttggtcaattgaatggtttgacctgcatcgtcagtgacggttggaaattgcaaatcagaattatcgaggacactgaatgtctggctggcagcgcctaatatatcgccagctgcggcaattaaggcctcttcttggccggatagcacgtgtgctcggctagcagtaatcgtttcgatgaaatggcggtaaggggctaatacgggctcgttagtgagccagttcgttaattggatttcattaacggctaatatggcgggttctaaaaaagcagtcgtcgctgagacctcggctgcgagggcgtcaacctgtgcttgataaccttgataatgattattagttgtatcttgatcgttttttagactggcatagacgtaaaccgtttctagttgacggaacaaagccagaacggtcccgatagtggtttgtagttgtagcgccgtgtcaaaagtcacgggctggatggtagccatcgctgttttgagcgcggataaggcgtgttcaaaggcctggtcatctttaaaaattgtgctgagatcccaagtgagttcagttgggacggtttcacgaatgggttgttgattagtcgtcattaataaagcctccatagattacaagatttctctgtattttaacataatcgggttaaattgactgatatcagtgatttgttaattattaaaattgtgtaactttttctgaaactgattgtttgataatataattcggctataatacaaatagcacaacataaagattggtccactatagaaaggaaccacttatgcagaattctaattattttggcacgcgagaagataaatataaaaaaaataaaaaacaccgtaaactgaaggtcttcatcctgattctagttttgttgattggcggcggtggtgcgtatgccatgcgaattagcggtcagattaaatcggctgctaataaaatttataaaccagctgatggcaaatccgtttcgacatccatcaagaataaaaaggcattttcaattctgttattaggggttgataccggggcggaaggccgagttgataagggaaattccgatacgatgatcgtcgccaccgtcaatccgaagaaaaaccaagtgaaattggtcagtattccacgggacacactcgcccaattacaaggggccgaaagtttcaatatgcaaaaaatcaacgcagcgtacaatgtcggtggttctaaaatggccatgtcaacggttgaaaagatgtttgacgttccaattgactactatgtgacggttaacatgggggctctgtctaagattgttgatgcggttggtggcgttgatgtagaagtgccattcgattttgcttggaatggtagtagcttcacgaaaggcaagatgcatttaaacggcacgcaagcgttaaactattcacggatgcgttatgacgatccagagggtgattacggacgtcaaaaacgacaacgacaagtgattacgtcgatgattaaatcagccgtttcgtttaaatcgttaacgaattttgaatcaattttaaatacgttagaagatagtgttgcaaccaacctgagctttgatgatatggtttccatgcaagccaattatcgcagcgcagctaaatcaattaaatcggattatttaaagggtcgggatgctgatgttgaaggttcttcttatcaaattccaaccaatgatgaaattcaacgcgtgtcagacgttttacggacggcgttgggcttgaagaccacgacaattgataatgctgaaaccaaacaaaatgatctcaatacgaattttaccggtttagaatatcagcaagattttacggtttactctgagagtgtgatgaatggtggcacaagtactgatacagcaacaaatgactatagtactgatacaacctattcagatcagtcatcaacgacaggtaatacttggtcaacgcaagaatcgactagtcaatggaataacggttattaattgagtgcccgcacccacggtttgattctgagcattagcctagtttcgtgaataagtccggtttatggacttgtttacgaaacgtcgctaagcacaggaatcagtgggggttggcacgttaaagaagtaagtgtgttgagttgcgggtagcaactgagcattaacagaaaattcccagttatcttggtttttaagataattgggaattttaggttaagcggaagttgtcgcaacccaaaagcacgttatcaattgcctatcaagaccaaaaaccaacctattctgaattaaggataggttggtttttgatttcaacggaaattgataccttctggcgcgcgttaacgaagaaaatttgtttgaaatcataatactgagatttgttggacgcccgttttttttaattccttagtttacatttaaaagcgagcaaggtatcatttaaaagggcctttttgtgctcaaaaaatagatgggatgtgacgtagcgtgtatttactcgtgaacgtaatcggtttgttggtctttatcggtgtcggctttattttttcaaagaaaaagaaggaaattgattggcgtgcagtcatcacgatgttagtgattaacttggttttagcttggttcttgaccagcttttcaattggtcgcgatattgttttaggcgctgctaacggttttaattggttggttcaagtggcttacactgggattgcctttgcgttaccaagttgggttaatgtgaaacaaatggactttgtggccagcgttttattacccatcttaatgattattccattatttgatattttaacttatatcggtattttaccttggattatcaagtggttaggtcgtggtctagcaaagattaccggccaaccgaagtttgaatcgttttttgcggttgaaatgatgtttttaggcaataccgaagccctggccgtttcaagtttacaattgaaacagatgaaggcggaacgaacgttgacgttagcgatgatgtcgatgagttgtgtgacggcttccatcatcggagcttacacgcagatgatgccgggtcaatttattttaacggccattccggtcaacattattaacgctattattgttaccaatattttaaatccggttaaagtcacaccggaagaagacacaattgctaaaatgggtggcagtgcttctgcccccggtgaagaagtcgctgcagacggtaaaattgaacgcgaacctttcttctcatttttaggggattcaattttaaacgccggtaaattagtgctcattattacggcgaacgtcattgctttcgttgctttggcagccttaattgataaagtattacaattgattaatccttggattacacttgaacatttactagggattgtgatgttcccattcgcctggttgatgggcttagatgtctcacatgcgtttgaatttgcgcaatatatggggacgaaattagtcaccaatgaattcgtcgttatgggtaaagtttccggttcaattcacacctttgcaccgcattaccaagccgtcttaacggtgtttgtaacgtcatttgccaacttctcaacagttgggatgatcatcggtgctttcaagggcttagttgatcgcgaaaagaacgatatgattgctaaaaacgtcggctacatgctgctatctgggattttagtctcactattatcagcagccacggttggtctattcgtttggtaaccacgctgtcttaaataaattaaaataaagggcccgaccgattcgattttgaattggtcgggccctttttttacggattcagctaaaaattggctagacggttagcctgaatcatgtataatgagcatgtattcaaagccgaagaaaggagtgtcttatggcggatttagtttatcaaaatattatggccgatttaaaaaaagcgattaatgccggtcagtttcccagtatgaaattaccggatgaacggacgttaaccgaacattatcaggtgagtcgtagttcggttaagcgggcgctgaacgtgatggccaatcaaggcattatctttaaaaaacggggttcgggaacctttatcaatcctttatatttgaagagtggttcgttttttaattacagtggttcaaatctagggattaccgatagttttaaagcgggcaatcgtaaaccggggattaagttgctcgattttcaggtgattaaaccgaacgaagaattgcaacgcgatttatttttgaaacccgatgattttgtttatcagattaaacgattacggttgtttgatcaagaacccttcatgattgaaacgggctttattccaattaaagtcatgcctgaattatctgaaaaaattgtctcaggctcaatctttaattatttagaaacagaaaagaatcaagaggtgaccaaagcctttttatcgatttttgcggaaccttcaaccagtgatgatcaagcccaattgcagctgacaccaactcagcccgttggtattatggagggtattttctttttagatgatggcaccccgtttgaattctcaacgatgcgactccattatcaatacatgaaatacaatacattcgtttctgtcagcggtcgagaatagaccgttatttttatcaaaaatatattggtacgacccaattattaaaatggttgactttttctgaatatttagtatgatgtaagggtagtcataatatttgctttctgaacaatttatttttaaagttaagtcgttaaagacttttggaaaacccaataaaaggagtgttattagtatgacagattattcaagcaaagaatacctcgctaaagtagatgcgttctggcgcgctgccaactatatctcagtcggtcaactatatttaaaagataacccattattaaaacggccattggaagcaacggatgttaaagcaaaaccaatcggtcattggggcacaatctcaggccaaaacttcctatatgctcatttaaaccgggccattaataaatacaatttaaatatgttctacgttgaaggccccggtcacggtggtcaagtgatggtttctaattcatacctcgatggtagttatactgaaatctatccaaatattacgcaagatgttgaagggatgaagaaattatttaaacagttctcattcccaggcggggtggcgtcacatgccgcacctgaaacaccaggttcaatccacgaaggtggcgaacttggttattcattatcacacggtgttggggcaatcttagacaacccagacgtcattgctgcagttgttgtgggcgatggtgaagctgaaacgggtcctttggccgcttcatggttatcaagtacattcatcaaccctgcaaatgatggtgcggtcttaccaatcttaaacttaaatggtttcaagatttctaaccccacgattttatcgcgtaaaacagatgaagaattatcgaagtatttcgaaggcatgggttggacaccaatctttgttgaaggtgataatcctgatttgatgcatccagccactgcgaaagcaatggatgaagccattgaaaaaattcaagcaatccaaaagaacgctcgtgaaaatggcgatatgacacgtcctgaatggccaatgatcgttttccgcgcacctaaaggctggaccggtcctaagacttgggatggcgtaccaatcgaaaattcattccgtgcgcatcaaattccaattcctgtcgacagtgctgatatgcaacatgctgatgcgttagttgactggatgcaatcataccgtcctgaagaattatttacagaagccggccaattgaaaccagaaattgctgaaatcgcacctaagggtgaccaacgaatggccgctaacccaatcactaatggtgggatcaatcctaaggaactacgtttaccagattatcgcgattatgcacttgataatcaagaacatggtaaaatcgttgcccaagacatgattgtttttggcgaatatgtgcgtgatattatcacggctaacgatgacaacaaaaacttccggatcttcggccctgatgaaacaatgtcaaaccgtttgaaccacatttttgaagtcacaaaccgtcaatggatggaatctgttaaagaacccaatgatcaattcgaagcacctgctggccgtgtcttagactcacaattgtctgaacatcaagctgaaggttggctagaaggttatgtcttaacgggtcgtcacggcttctttgcaagttatgaatcattcttgcgcgttgtggattcaatgttaacacaacatttcaagtggttgcgtaaagctgatgaacaatcatggcgtaacaaatacccatcattgaacatcatcgcaacttcaactgttttccaacaagatcataatggttacacccatcaagatccaggtatcttgacgcacttagctgaaaagaaaccagcattcatccgtgaatatttaccagctgatgccaatacgttattagcaacgatgaatactgttttccaaagccaagaaaaaattaacttagtcgtttcatcaaaacacccacgtcaacaatggtttacaattgatgaagcaacaaccttagttaataacggtttgaagattattgattgggcaagtactgatcaagatgctgaaccagacgttgtgattgccgcagccggtactgaaccaactttagaaagtttagcagcaatctcaatcttgcatcaacaatatcctgacatgaagattcgtttcatcaacgttgtggacttattgaaattacgttcaccaaaagtggaccctcgtggtttaacggatgacgaatttgatatgtactttacgaaagacaaaccagttgtcttcgcattccatggctttgaaggcttagttcgtgacatcttctttgatcgtcacaaccataacttacacgttcatggctaccgtgaaaatggtgatatcacaacgccattcgacatgcgggtcttgaaccaaatggatcgttacaacttgtctaaagaagtagctgttgatgttcttggcgacaaagcgggtcagttcgctcaatcaatggatgatatggttgctaaacacaatcaatacattcgtgatgaaggcgatgatttaccagaagttgaagaatggcaatggacaccactccgttaattagtggtttaaaatagactaggcaactgcctggtctatttttgttgataaatagggttaatctagctttatttttagggataataacggtaaactagaagataagtataattttagaaagaggcgtatttttttatggcaaagaacaaaatccgcgtgcgttatgcaccaagtccaactgggcatttgcacatcggaaatgctcgtacagcattgtttaattacttattcgcacggcacaacaaagggacattcgtgattcggattgaagacacggataccaaaagaaacattgccgatggtgaaaaaagccaattagataacttgaaatggttagggatggactgggatgaaggtcccgataaacccggtgacttcggcccataccgccaatcagaacgtcgtgaaatttatacaccactcattcaagaattagttgaaaaaggtttggcttatgaatcttacatgactgaagatcaattgactgaacaacgtgaagcgcaaaaagccgctggcgaagcccctcgttatctgtatgaatatgaagggatggacgacgctgaaattaaagccgttcaagacgctgctaaagccaaagggttacaacccgttgtacggttacgtttgcctaaagaccatatttataaatttgatgacatcgtcaaaggtgaaatcagctttgaatcagaccgtttaggtggcgatttcgtcatcatgaaacgcgatggtatgccaacgtataacttcgcagtcgtcgttgatgaccatttgatggaaatcacgcacgttttacgaggcgacgatcatatcgctaacacgcctaaacaattggccgtttacgaagccttcgggtggacaccaccaacgtttggccatatgaccttaatcatcaataccgaaaccggtaagaaattaagtaaacgtgatgaatcagtgctccaatttatcgaacaatatcgtgaattaggttacttaccagaagccatgtttaacttcatcgctttattaggttggtcaccagtcggcgaaagcgaaatctttaaccgtcaagaattcattaaacagtttgatccaaaacgcttgagtaaatcacctgctagtttcgatcaaaagaaactagaatgggttaataaccaatacgttaaaacgactgataataataaaatcatggatttagccttagcaagtttgattaaagccggtaagattgctgaaaatcctgacactaaaacgattgaatgggcccgtcatttgattgcgttatatcaagatcaaatgagttataccgctcaaatcgttgaaatggcggacgtcttctttgaagaaccagaacaattagacgctgaagctttggaagaactccaaaatgaaacagcaccaatcgtcttaaaagaattcagcgaacgtttaaataacgtgacgttattcacggcgcctcggattatggccgtcattaagagtatccaaaaagatacgaagattaaaggccgtcaattgtacatgccaatccggattgcaacgacccgtgaaatgcacggcccttcattgcctgattcaatcgaattattaggtaaagaaaaagtgcttgcacatctcgctaaaacgctaaaagaaattcaataacttcttaataaggaccgccccaaacaatcatcactgattgcttgggacggtttttatttggggaatttgtatcatatattaagatgattaatcagattgctgtaaccccttacaaataacggtatactaatcatattacttggattaacggaggaattaatgatgaaagttttaacttttggtgaaatgttaatgcgtttaaaaacgccgaataatcaacggattatgcaagcacaagcatttgagacctcttacggtggggcagaagccaacgtggccgtctcactaggcttattgggcgatcaggtcgcttatttaacccgcttaccagagaatttattagggcgtaatggtcaacaaacgttgcgtcaatacggtgtcgatacgaccaaaatccaatttaccgacggccgcttaggtttatatttctttgaaaaaggggccagtgttcgttcgactaacgtcgtttatgaccgcgcttatagtgctttttcattggccaaggcgactgaatttgattgggccagtatttttgaaggcgttgattatttctatttttcagggattacgccagcagtttcagctgaattggcgcaagcagccgaagaagcttgtcaatattgccaagcccatcaaattccagtgatttgcgatttgaactatcggggcaaaatgtggtcggcaacgcaagccactcaaacaatgcggcatctaatgacctatgtcacgatttgtatcgcgcatgatgaggatttcgaagcaactctcgggattaaggcgtttgatggcgacgaagcccatgggattgctcaaaaggcgtcgtttaaacaagccatgcaacaagtccgtcaagattttccgaattgtcagatggttgcgagcattttacgcaatatccgctcggttgaagacagcgattggatggccttgttattaaagggtgatcaattctatgaaacggacacctatcatgtccacgtgatggaaggggttgccgctggagacgcttttggtgcgggtttaatgcatggtttattaaacgactatcaaccagacgaaatgttacaattcggattagcggctagtgtcgctaaattgaccattagtggggatttcaatttggtctctgaagctgaaatcaaagccattgcagctaacggtggcggtgcgcgattagcacgttaaaaaatgaaagatggcgctattaaaaacggaataatgctatcaatgtaaacgttttattgttataatcaaggtattcaatgaggaggtcttgatgatgacaaacaaagtagcatttattactggtgcagcccaagggattggggaagcagttgcaaaacgtttatcgaatgatggctttgcggtggcgattgctgattataatttagaaggcgcccaagctgtggccgctgaaatcaatcaaacgggtaaggcgattgcggtcaaagttgacgtttctgatcgtgatcaagtttttgcggcagttgcaacgactgtcgaacaattaggtggactagacgtcgtcgtgaataacgccggtgtcggtccgaccacaccaattgaaaccatcacaccggaacaattcgagaaagtgtatgccatcaatgtcggtagtgtttattggggcattcaagccgcagttaaggccttcagagagttaggccacggtggtaagattattaacgcctcatcgcaagcgggccaagtgggtaatccagagctagctttatatggtggtactaagtttgccattcgcgggattacgcaaacggcggcgcgcgatttagcggctcaagatattacagttaacgcttattgtcccgggattgtgaagaccccaatgatgatggatattgcccacacggttggtcaaaatgccggcaaagatgatgaatggggcatgcaacaatttgctaaagacattacgcttggccgtttatcagaaccggaagacgttgcggcctgtgtcgcttatttagctggcccagattctaattacatgaccggtcaagcgttaatcattgatggtgggatggtttttaactaaaaaatagtaaaaaagaagtatcacgcttagcgtggtacttctttttttagtgtcttgtacgatcaatttcagtgcggatttcttggaaggtttgttcggtttgatcactgttgctgatggcgaccatcatgaacagactatcaattaaactgatttgggcaattagggcgtggagtgcttcggcgcggtaattggtttcttcagaaatcgatagtaacgtgatatcaccgagattggctaaagttgaattgccaaaactagtgatcacgattaatggcacgtggcgttcttttagaatccgtgcgagttcgagcgcatctttattttggccactgtgtgaaatgataatggcacaatcggcatcggttagtttcgttgcttgcatcaattgcatgtggtaatcctggttatagacggttggaatcgtggttcgtaagaatttatgatagccgtcttgtgcgacaattccggaagcccccaacccgaagagaccgagaagtttggcgtggttgatgaggttgactgccttttgtaattgggtttcggtcaataacgaccaagtggcctgcaaggcattactattggatgaaaaaatcttttcggccattgtgacgaaactgtcttgttcgctaatttcgtgaaagagtggggattgtaagggttccttagcgagtaaggctagtttgaaagcttggaagttggtgaatccaagtgccttggcaaagcgcgaaatcgtggccgttgaaacctgacaatcggctgcaaattcttgaatggttaattctggatcaaagctggcttgtttcagaatatagtcggcaatttgtttatatttttcacttaaatgatcgtaataggaatgaattaatgaatcaatattttgtggcatgacttgaaacctcctaaaaattgactatcttaagtatagcacatcacaagttgtgaaaacttttttcttaaaatggcttgcattaagaaaacttttttcatataatgttcgtagagatgaaaatactgataacaacaaggggattttacagatgaaattagcgatgattgggttaggcaaaatggggattaacttggtggctaacttacgccgcaatggccatgaagtggtagcctatgatttgaatcaagcggcagtcactgaagccactaatttaggggcagtggccgccactgatttagacgatgtgattgcccaattaccaacacctaaaattgtctgggtgatgttacctgctggcaaaccaaccgatgcaacgattcaaacattcagtgagaaattaaacgcgaatgatatcttaattgatggtgggaattcattttttgaagattctctaaaacataatgagttgttaagcgcacaaggcatcaagttcttcgatgctgggacttccggtgggatgagtggtgccaatcacgatggtaatttcatgattggcggcgatgacgccgaagcctttaagattatcgaaccgatttttgaagggattgcccaagaagatgggtatctctatacgggtaaagccggcagtggtcattatttgaagatggtccacaacgggattgaatacgggatgatgcaatcaatcgctgaagggttcgacgttttggaacatggtcagtttgattatgataacgaagccgttgctaaagtttggagtaatggttcagtgattcgtggttggctcatggaactagcccaatctgccttttcaaaagatcctaacttggaacaactcaaaggtgtcatgcattcttctggcgaaggcaaatggaccttggatgaagctttgaaattacaagtgccaacaccggtcatcgcgatgtcgttgatgatgcgttatcgttcaatggaagatgatacttttacgggtaaagtcgtcgctgctttaagaaatgaatttggcggtcacgctgtcgataaaaaataaatcaagcaaaaatgcacataaaagaggggattcatgatgaaatatatgattggcgccgatattgggacaacgagtacgaaagccgttttatatgatttgaaagggcaagtcaaagcctacgcaaatgtcggctatcctttataccaaacgacaccggatatggccgaagaagatccagctgaaatttttgacgccgtgattgaagtgttaggtcaagtgatgcgcaaagggcaagttaaacctggtgaattgcaaggcgttagtttctcagccgcaatgcatagcttaatcctaatggatgcgcaaaaccaacccttaacccgcgcgattacgtgggcggacaaccgggcagctaaatatagtcatgagttgaaagacaacgggttagggcacgccatctatcaacatacgggcacgccgattcaccccatggcaccgttgtctaaaattatctggttaaatcgggaacaacctgaattatgtgcacaagctgtgcaatacattgatattaaaacgtatgtcttccaacgattattccatacttacaaaatggattattcaattgcttcggcgaccggtttattcaacatctttgaactcgattgggatcaacaagcgttggaagtggctgggattacgcgcgagcaactcccagaattagtggcacccactgatcaaatattaggattggacccagcttacagtcaagtgactgggattagtactgacgtgccatttatctttggggccagcgatggtgtcctatcgaacctaggcgttaatgcgattgatccgggagtcgtcgctgtgacaattgggacgagtggtgcggtgcgcgtggtcgtggatcatccggtggtcgatccgaatggtaacttgttctgttatgcgttgacgaaagacaaatgggtcgtcggcggcccggtcaacaacggcggaatcgttttccgttgggtgcgtgatcaattatttgcccctgaaaaaattacggccgaacaaatgcgtgtttcgacgtacgatattttaacgcagattgctgaaaaaattcccgcgggttcagatggcttattattccatccgtacttgggtggtgaacgggcaccgatttgggacgctgatgcacgtggttcattctttggcttaacgcggcaacatacacgggcgcacatggtccgggccgctttagaagggattgtttacaatctctacatggtgatgttgatgattgaaggggtcgctggtaaaccgaagagtattcaagcaacgggtggttttgcccgttctgaattatggcgacagatgttagccgacgtttttgaacaagatgtcacgattcctgaaagctttgaaagctcatgtctcggcgcagcagtcctcgggatgcaatcattagggttaattgatgatttatcagctgtcaaagatatgattggggtcaccaatgtccaccaacctaaggaagctaactttgaggtttaccgtgaattgattccaatttggattcgtttaacacgggcgttaagtcctgaatacagtgcgattgccgatttccaacggcggcatatgcaaattgaagcagatatcgatgattaataagcaatgggttgtttttagacaacccattgtttcgaccactaaatgatagcgcaaacataatggaaagtaggaaaaataatggccttattagtcttgttactcgggattttgttactattattattaattattaaatttaaaatgaatacctttgtgtcactggttgtgaccgcgatggttgtcggtgttgggttagggatgccgctgactaagattgcgaccagtgtccaagacgggattggcgggcagttaggtgaattatcaattgtcttcggttttggcgcaatgatgggtcggttagtcgccgatgccggcggtgcctttcgaatcgcgcatacgttaattgacaagtttggcaagaaacggctgcaaatcgccatcatgctcgcgtcatttattatcgggattgcgttgttctttgaagttgggatggtcttattagtgccaatcgtctttgcaatcgcacttgaagctagtgtgccgattttatatctcgggattccaatggccgctgctttgtcagtgacccacggtttcttaccaccgcatccggcaccgactgcgatttcagctgcattgggtgcaaatgccggccacgttttgttatacggcatcatcatcgcgattccagcggtgattattgccggtccgttatataccaagatcgctcgcaaattagtaccagatgccttttcacggcacggtaatttaacggcgttagggcctcagaaagaatttaaattagccgaaacacctggcttcggaattagtgtattaacgtcattattccccgtaattttaatggcgattacgactagttatcaaatgatttttaacgatggcgctttgcctaagaatccaacccttttggattcaatcgtggcgttcattggcacgcccgcaattgcgatgacgatttcattattagtggggatgtataccatggggtgggcgcgtcggattaaaaccccgacgatcatgaaaacgttggaagaagccgttaaatcaattgcaatgttactcttagtgattggtggcggtggcgcgttcaaacagatcttgattgatggcggcgtcggcaatagtgtcacgcaactattcgccaatgttaatttgtcgccattaattctaggctggttaatcgccgtggttttacggattgccttaggttcagcgacggttgcttctttaaccgctgccggattagtcttaccattgatgcaatcggctggtgttaacccggcactaatggtcttatcgatcggcgctgggagtttagcggcatcacacgtcaacgatgccggtttctggatgttcaaagaatattttgatttaagtgtcaaagaaacattagcgacttggaccgtgctggaatcactcatttccgtcgtcgggctggtcggtgtcttgttactgagtttagtggtttaatcaaaaaagcagttgaagcgtcccaaaaaaatgggcgcttcaactgcttttttagagcttttattttgcttctttggcttgacgtgctgcgcggtggtagattaaacggataatcttatcaatttcagtgagcactaaaattaataaaccagcggcaatcgcgacgccccattcaagcatcgttaatggttccgtgtagaaaacgtgttgcatgaatggtacgtaagttaaaatcaattgtaacgcgagcattaaagcgatgatcaagaaggctttcggattggtgaagaaggctttggagaaagctaattctttggtccgaatgttaaagagataaccaatcttactgatgataatcatattgaccatcatcgtgctggcagtcgcttggtcaacgcccttgctaatcaaccattgataggcgattaatccgaacaaggccatcaaaatcgaaacgtaggccatttggaacacgtcatgtttgttcattaaagattgaccggttttgcggggtttacggtacataatcccagattcagccggttcgaagatgaacgcgaactgaatcgtaatcgctgacaccatgttaatccataaaagttgtgtggcttggagcggcattggttgttgcatcaaaatcgtgaacgcaacgatcagcccctcagcaaatgaagttggcaataagaataagatactcttcttgatattatcgtaaatccgacgcccttcaaaaattgctttcgacatagttgcgaagttatcatcggttaaaatcatatcggctgaatccttcgcaacatcggtgcctttaatccccatggcaacgccaatatcagcttgctttaaagcgggggcatcattgacaccatcaccggtcatcgccgtgactttgtggcgtgcttggagcgcttggacgatttcgagtttattcttcggcgttgtccgtgcaaagacttgatggtcaacagccgcggcttctttttcttcagcgcttaactgttcccattcagcaccggtaatcgctttgatttggtcggctaatcctaattgttcaccaatcgctttggcggtggctggatggtcaccggtaatcatcttaacgtcaatgccggcgcggttcatttcttttaacgcttgaatgacttcatcgcgtgggggatcaataatgccagctaagccgagtaattgaatcccggtattgagttgttcatgcgtaaccttgtcaatcgtgtcagagacgtcgagataaccaaccgcaatcactcgtttaccttgttctgataagcgttgaacggtcgtttgccaaggcgtagtgtcaaaatgggcatcgaattgggctgccattgggagtaatttatctggtgaaccctttaaataaatccggtgttggccagtcggtaaggtcaccagtttagccatgtaacggtaatcagaatcgaatggtaacatatcgagttcttcgttggctggaattgtttggtcggggtggactttataataggccgttaagaaggcaccatcggttggttcaccgttgatcacccagccctgatccgtattcactaaggtggtatcgttggcttcaaaacccgcttctaaaaagaggttcaagcgatcgttgagttcaaccggttgaccgtcgatttgaatggcaccttctgggacgtaaccgttaccggttacttgatacgtttgttcgggggtgatgatttctttaatcgtcatttcatttttagttaacgtcccggttttatcggtcgcaatcacatcgactgcgcctaaagtttcaacggcgggtaacgtcttaacaatggtatgttgctttttagccatttcgctgacacccatcgctaaaataacggaagtcgtggctggtaaaccttcgggaatcgaaccaacgaccatcgcaacgattgcgacggctaagacggagaccgagtaagtcccgaaaacgaaacctaaaataaagagtaagacggcggcaccaattacgacgtaagaaacaccggcaccaacgccgttgatttcacgcattaatggggtgacgcgcgttttcgtttgattaacggccgttgaaatttggccaatttcagtttggtcggcggttgcgacaacaacccccatcccactaccgttggttacggaagtcgatgcgaagaccatgttcagttgttcggccaaaggcaccgcggcgtcggccaaaggttgatccgttttgatcactgaatcggcttcaccggttaaagttgcttcttgaatccgaagattttcggcagagacaatccgtaaatcggctggaatactatcgccagcttctaagaagacgacatcgccgaccaccaattgatcagtcggaatatcgattcgttgaccgtctcgataaaccgtggcttcagtggccaataattgtttgatgcgttctaaggcattcgatgcgttggcttcttggtagtagccaatgacggcgttaataatcaccactaacccgataataatcgcatctgaataatggcccattaacaaggttaataaagcggccaagattagaatgtagataatcaagttattgaattgtcttagaaaaaggacccatttagaggtcttgtgactgacgagtcggttaggaccgtctgccaataatttagcggctgcgtctttttgacttaagccttgttcgaagtcattctctggataatgagactgtagttcttcgatggttaactgatgagcgtttgatatttttgtcatggtaaaactcctttataatagtggctgaatacggggttgcacccacggcttattcttgtctaaaataagggatttcaaaataaatcaaacacgacgcctcgtcagagctatctgtcaaaccaagtcacctcctaaaaatttaatcactaacactaaaatatcaagaaattagatttatgtcaatctaatgagaattattagcaaatatttaatgaaattattttgccagagacccagagctatgctaagataagggtataataaatttaattcggttgaagcattgcgcattcaagatttccttctttagggtggtagaaggggattttggtgcgctttttttgatgaaaggaatttttagatggcaactttagcaattattttaatcagtaccttattagcaggacatttcagtaaacgggtgggcttacccgcggtgattggccagcttttagtcgggattattctgggcccggccttattggggattttacacgaagacagttttatccatactttttcagaaattggtgtggtgctgctaatgtttattgccggattggaaagtgatctggcattattaaaacggtatctcaaaccgagcgttgttgtggcggtcttgggggtcgtattaccagtcggcacgattacggtcctttgtcgattatttgaaattaacgcattagaaagtctatttatcggtgtgatttttgccgcgacttcggtttcgatttcagtcgaagtattacgggaattaaacgttctggaaagtaaggaagggacgattattttaggcgccgccgtggtggatgatttattagcggtgattattttaagtgtcctaacgagcttatttggcaatcaattagccacttctagtagtagccatttaagtttaggcattagttttgccttacagtttgcattcttcattgttgtgtatttcagcgttaaatggttggtgcccggtattatgcacctcagccaacgcttgttggtgccatattcaaacgcaatcgtctcgttaacgatttgtttcctatttgtttggttagcagaagccgttgatttgagcaccgtcgttggtgccttttttgccggaattgcaatttcacagacaccttataaggcagaaatcaatcggcatattgaaccaattggctacaccgtctttattccggttttctttgtcagtattgggttatcgatgacgtttaacgatttaaaccgccatttagtcttcattatattgttgacgatattagcagttgtcactaaattaattggtggtagcttgggagcccgcagatttggggtctcaaaagctggggctaaaacgattggtgcggcgatggtttcccgcggtgaaatggcgctcattattgctcaaatcggttatgcagcgaagttgattagtgagacctactattcagccattatttttgtcattatactaacgacgattgtggcgccgttaattttgaagagcgcgattaaaaagcaacagtctgttgcgttaattgatagtcaaaagggttaaccgaaagtccttgtgaatgatagagcaataagatataatcaccttgtaaaaacgtttacattaaggggtgtttatgatgaaagcagcagttgtgaatcagaatcatacggttgatgtgattgatcaggaactaagaccacttaaggcgaacgaagccttggtgaaaatggaatattgtggtgtctgccataccgatttacatgttaaaaatggcgattttggtgatgttccgggacgcgtattaggccatgaaggtgttgggcttgtcagtcaaattggtgcagatgtgacgtcgttaaagattggcgaccgggtaagtgttgcctggttctatgaaggatgcggccattgtgactattgtgttaacggccaagaaactttttgtcgacaagctcagaatgcggggtacacagttgatggggcgatggctgaagaatgtattgtcgtcgcggattatgcggttaaagtgccagctggtttggaaccaatggcggcgagcagtatcacctgtgcgggtgtgacaacctataaagccattaaagtctctgccgttcgcccaggtcaatggctagtgatttttgggatgggtggtttaggtaatctagccctgcaatacgccaaaaatgtcttcaacgctaaagtgattgcggttgatattaatgatgaaaaattagcgttggcccaaaaattgggagccgatatcacgattaacggccaccaagaagccgttgttgaacggattcaagccgttacgggtgatggtgctactgctgccgtgattacggctgtttctaaagtggccttcaatcaagctgttgatgcggttcgagcaactgggaaagtcgtagctgtcggattaccggttgaaacgatggatttatcaattccaagattagtgttggatgggattgaggtggttggttcattggttggcacacgcgttgatctggcagaggcttttgcctttgcagctgaaggcgcggtgatcccgattgttcagcgccggcctttgagtgcgattaatcaaattttaactgaaatggctgaaggaacgattagcggccgcatggtgatcgacttttcaatggggtaaagtcgatagcgcattcgttgagaaacgggatagttaattaatgaattaataaagggtgtgcactattaaataataggcaattattataaaatatttctaattataattataagcaaaatgttgacttgtgaagttgaacacgatatactttattcacggtcaaaaattaattaacgaggtatgtaatcatgacaattgttgtaggtgatttagttcgctgtcagtccaatgaattgatgacggaatcttacattggtaaggtcatcgctaagtgggatcattcagtgcatgtgctcatattgcattatgcgccgaatgatcgacacgttgttcatgaattgatgcagcggattattgtgcatcgacagcaattaagcaatatctcgttaactaaattgacttgttaagattaattcattcctcccccctagtgacagccgttaacctcccccggtgacggctgtttttgtgtgcgctaaaattggattcggtttcaaatcaagtggtgtcaagaataatgaaaatgtcatcaatttttttaaacgagttctaggacaattgaaacaagttatgctaaactaatgaaggattatgtgagcggtggggaccagtaaagttaggttatcctaaaatcaaagtcattgaatcctaatagttgtacgactcaatcgaagagaaagaggtgcttttatggataagaagcagcgagagaattcacaacaaagtgaagtcgatcaagaaaagcatgagaaatttattcattatgctgatggtagtagtctggaagaaatcaacaataccgttgccattccaaagaacgcgggtttttggaagaccttaatggctttcatgggaccaggggcgttagtggcagttggttacatggatcctggtaattggattacgtcaattgccggtggtgctcagtacgcgtatacgttgattagtgttattttagtatcaaacttaattgctatgttgctccaagcaatggcagcccggctcggaattgtgacgggcatggatctagcccaaatgacgcgggctaaaaccggtaagaaaatggggattttcttatggattgtcaccgaattagccatcatggctaccgatattgccgagatcattggttcggcaatcgcgttagaactgattttcaatatcccgctattatggggcgttctcattaccgcatttgatgtattattgctattattattgatgaaacttggtttccgtaaaattgaagccattgtggcgactttagtggccgttattctattcgtctttttatatgaagtgattctagcacaacctaatatggtcgacgtggcaaaaggctttgtcccaaatcctaaaattgtcacggatcgtaagatgttattcttagcattagggatcgtcggggcaacggttatgccgcataacttgtatttacattcatcaattgctcaagcacggcaatacgaccgcgatgatgttgctgaaaaacgtaaagcaatcaaatttacggtcattgattctaatattcaattatcgattgcattcatcgttaactgtttactattaatcttaggggccgcaatgttcttcgggactaatagtgagttaggacgctttgttgatttattcaacgccttacaaaacaaagaaattgtcggcagtattgccagtccgatgttgagtttattatttgcgattgccttattagcttctgggcaaaactcgacgatcaccgggacgctttcaggacagattgtcatggaagggttcgtccgcatgaagattccattgtgggcaagacgagtgattacgcgaggattatcaattctacccgttatcatctttacggtttattatcatggtgatgaagcccaagtcgaaaacctattgatttattcacaagttttcctcagtgtggcgttaccggtatctatgattccattgacgatgtttaccagtgatgaaaaaatcatgggaccatttgtcaatcgaccatgggtcaaatataccgcttggtttgtaacggttgtgctaaccctcttaaacatctatttgattttacaaacaattagcttagtagcctaaattaaaaagcgatttatgccgcgtttgatacggcatgaatcgctttttttgtgtcctttacagacgactaattagctcgtatactgacattatagagattgataaaaagtgagcaaataaaatgcgattgatttcaccattttgattcaaaatgactggaggaaaagacaatgttgacatcaaaattatttattcagaatttacaagcaggtgttaagccagcaactgggtgtacggaaccaatcgcagttgcttttgcggccgctaattgtagggttcatttggacgaaggcgagattgaaaagattgaagtcttggtttcatcaaacgtgatgaaaaatgcgatggccgtgatggtgccaggcattggcgaaccaggtttgcagattgcggctgtcaccggcgcgttagcgggtgatgcgactgccgggctagatgtgattgccaacattgcaactgataaaatcccgttgattaaaacgttagcgtattcggggaaagtgactgctaaaattgcgccagtcgaagatgatttgtatgtcgaagttgggattcagaccgcgacaagtgacgttcgggtttacatcgcggggagtcatacgaatatttatcggcttgaaaaagatggccaacggttgattgatcatgaacgaccagcgagtcatgctgtttctgatttgaaaaatgggatgcaacaagtcacgttccagcaagtttgggacttttcaatgcaggcgccgctcgaatcaattgctttcatgcaagaagccgacatattgaatatgacgttagccgaagcaggcttagccaatgattatgggttgaaactaggccaatcattactcaagaatgcggctaatcccttaggacaaggaccggctgatttgcaagataatattatggcgtataccgcggctgctagcgatgcgcgcatgggtggggcaccgttaccggcgatgtcgaattctggttctgggaaccagggcattacagccaccgtccccgtcagtgttgtcgctcggcacgttgaagcaacggatgaacaattgattcgggcccaaacgttatcacatcttacggcgatttacgtccacgcctttttacccgttttatccgctttttgtgccaccgattcagcggggatgggcgcggctgctgggatttgctacctgttaggtcatgattacgataccgcttgtatggcgattaagaatatggctggcgatgcgcctggtatgatttgcgatggggctggttgttcctgcgcgatgaaagtggcgacgtcaacgagttcaatgtatcgatcggttaatctggcaattcaaggtattgtgattccagccaccaatggtttggtttgtgaatcgattgatgatacgattcacgggattggtattctgggtactaaaggcttgaaggctgctgatccagcggtgttagaagtaatgatggctaaataatgatgaacgatttaatccgcagattggtggattaaatcgttttttattgagtagcaatagagaatgatttcgtttccaaataatttaattgacgaatctagggtcaatccatgttaatattgtattaaatgggtaataagtagggagagctaataatgaatgctaaagaaaaaatgcaagctttaatcgatcaaaaaaagggtggcggcaagtccaaacaaacgaacgtcgctaaaaatgatcgtaagaatatgcgtaaaggccccaagatatttaaccgctaaactagcgtccaatcatgacaccttctaactaatattggaaggtttttttaatcgttttaaataacccttgctcgtcacgtgacgtcatgggttatggtttgaataaggaggtgatattctatgacgatttataccacgggagaactagccaagttgtgcggtgtctccgttcggacggttcaatattacgatggtgtccagttattaaaaccacatcagttgtctgagaacgggcgccgtctctattctgaaactgaagtccaaatattacggatgattctcggttataagcagttaggtttttcactgaaagatattcaacaaattatggcgagccaacaacggcgaacgttattgacgatgttgttaaaacaacagacgcaaatcattgcggaacgggaacaagtcttacgacggcaaaaagcgtccgttgatttcttattggctgacttaaccgagaatggcgaaatttcccaggaaataaacgtgatcgacatagaaaatgcaatggctaaaaaaacgcagttgcagaagttacacggtaagatgtttgcttggggctttttaatggacgtgattgaaattggtctgttggtattaggatttacgaaaggtatttggtggccggtctggctaggaattccaatcgtgattggattaggaatctatgtgtcgaaattgtactatgatgggatagaatatgtctgtccggcatgccaaacccagtttaagccacggctgcgaacgatgctctttgcccgtcacaacacgaaagcgcgggtcttgacctgtccgcattgtcagcaaaagaattattgcttggaagttagtagtaaatagtatttgtggttctttttaatgagcgagcatgatatgctattgctaattaagtacgcaacgggggttgtcatgatgattagtgatatgcagacgttagtttcaaaaaaaatcaaagaaattgaagctcaagaaaatgttgaagttatgatggctattgaatcgggtagccgggcgtgggactttgcatcgccagatagtgattacgatattcgctttatttatgttcggcgtgcaacggattatttgaaattagaagcacaacgcgacgtaatcgaatggcaattagatgaaacactagatatcagtggttgggatttacaaaaagcattgaagttattgtatcgttctaatccaacgctgtttgaatgggcgagttcaccgattgtttactatcaatcacctaagtttgaacagtttaaagaaattttgccacaatatttttcaaagaagaaaagtttgtatcactattggcacatggccaatacgaatcaacgagaatttttaaacgttgaattagcacaggttaaaatcaaaaaatacttctatgtcctacgcgcgattttggcgagtcaatggattttagaagaggggactaatccgccaatgcgattcgctgaactggtggcggctaagttaccgcaggaattacaaccagctgtcgctaaattattggcacaaaaggttgacgttccagaattaaaacgggtcgcgcgcgtcccagaattagatgaatatattgccagtcatatcagccaaatggaacagcaagcgcaaacgatgaacgagttacaacagaatgattgggaaccattagatacgctttttatgtcattaattaaatgaaaacagggcagtgacataagtcgtcgtattctgatattagacgaatatttttttgacgcgcgccagaactcatcaatttccgttcaaatcaaaaaatcgtctatccttagttcgggataggcgatttttcaacttgatactcaattgatacccgagttctgtcacagcttgtttttaagaaaattattcaaaagattgatccgggggtgcgaggtgtttgactgccttttcgaccaagtgatttaacgtttcggtttctgtcggtgttaatccagtttgggcgtagtcgctaccagccatggcgatctttttaatcgctgggtagacggccttcgcgtgttcggttggatagagtaaccgctggcgcttatcattgggatcaatcaccatttcaatccaatcattcttaatcaaataattgacggctttagtgacaatactttgttgccgaaaaagttggtgtaacagttgtttctgggagatgccgggttgatcacaaatgaataaaacgtaatagaaattactttcgctcagattatacgggcgcaattcacgattgagatattcgcgaatcatacgattataaattgaaatcattttttccagttgattaaccattggcttacctcatgcttttttaggtgaacgcaagtaggtgattgcgattaacattaataataccgtacaaatcacggttagccaaatcgctaaatggaaaccagtcacaaattgagcaggaatcgttgtgattaagatcattaaagttgtaaaagcggaaccggtaatttgacgtaaagtgttgctgatggcggtaccgtgactaatttcagcgggtgccaattcggataaggcttccgtaacagcagttggaatgatcgttgaaacaccgatgagtcgaatgatgtaggcgataatcacgatccaaatgttggtttgtttggttaagaaaactaaggggattgatgaaatcagtaatagtacgacaccaattgtaatcggtactttgggaccgtgctggtcataataacggccaacgattggcgcacaaatcgtgttcgcgatggcaccgggtaataagactaagccggtgattaaactagaataatgattgacgttttcgaggaaaatcggtaagagtgcttcggtcccgattagaatcccgaaaatcaacatgacgattaatgtcattttagtgaagctggcttttttaaagagccgtagattgaggagcggtgtggttaacgttaattgacggtggacaaaatagaaagtgacgaggatgccgaaaattaataggattgctgcgcctaatacgttacttgagaataatgaaatactaccgagaattgagcctaaaccgataatcgaactcatgacggatggcatatcgattttaacggcctttggttcagagaaattaggcaagaaacaaatgcccaaaatcaataagagggcgataattgggctgacgatgtaaaagagcgccttccatgagaaaaattgcatgacgagtcctgagaaactaggcccgattgcggggccagcagaaattacgagcgctaccatgccgagaaccgctccccgtttttcaaccgggtataaggagattaaactgatttggacaaaggtcatcagaatcccaccagcaacggcttggagtaagcgggcggtcaataaaatgtaaaaattattggttaacggtccgactaaactaccgaataggagtagccccacgacgccgataaagatttggcgactcgaatatttatcgattaagttcgccgatagcggggtaatcaaaccgataacgaggatgtaaccggaagtcagccattgggccaagtttagtgagatgtggaagttatccgtaatgatggggagcgcggtaatcatcgccgtttggttcaataaggcgagaaaagcggtcgttaagagaatgacgctaattaagtttcttctactgtttgtcaaaaataaaaacctcttcttcaaaaatttaatagattcaagtgaatgtttctatcttaaatgcatttgaatgtaattgcaagggttaatttttctgaaaacggttaatgtgaaaatttgatggcagttagtttcaaagtgtttaaagggaatcaccaaaaaaacgcaactatgtgattagctgcgttttattagtggttattcgccaggttgcaaaatttcatgagcgattgcttgatcgctggcttctttattgttgaatggcgtgattctgaaatttaattcaaacggttcaaccttggtccggtattgatcaagttgccattgaccacacgagaaggtaccaatcgcattttgcttataatcaaggttgacgacgatgtggtcggccttggttaattcattggtgtgtaaggcgttatcgacggtgacctcatcatagaatgacgtactaaagttgaatgtttcttcagtagaaaagacaattccttgaccgcggtcgtcagtgaaggccgaccatttggtgtcgagatggttaccgttggcttgtgggaccacgtagttcgtgaacaggccatcgacggtgttggtatacaccccgagtaaaccagcttctttagaatcagcgtagttttcgtggggaccgcgaccgaaatagcgcacttgttcgagattttgattgagatttaaaacaacgcctaatcgtggcaacatatccggtgccatatcgagtttgccacccggtgtcccttgtaagttgaaacggatatcaccacttgggtaaatcgtatattggtagcgacaatcgtaatgccaagggctattggtcgtgccattcagggtttgaacggtgacgattaagcaatcggcgagttgttcataatggaaattttgaaccgtttcgtgttctaaatggaggaattgtttcttcttcatctcatcgacaatttccatatcattactgattggtgcccgccagaaggtgaagtgggggccttgttcgattaattcgagaccgtcacgacaaaggctcaataagcgtccttgaacttggtcgaattgtaacgagaagttattaccagtgacgtctaaataagcaccgtgttctgctacggttaattgaccagttggttgaatcatgagacccttcgtatggattggtaattcgaattgggcagttgctaattcgtgaccagctgaggcgtaggcagcatccgttttaagttgataggacagattgagtaaataaaccgtccctggaagtggcgtgaaatcaagttgataaggcaattcaagttcagtagtttggcgggctggcacatcaggaagtgccatttcgccactttgtagtagttggtcatcggccaggatagtgtaaaccagtttgaattgatttaaattagcgaaatctaaacgactgcgtaattggatttgaccagttgcgagatcgagcatcgtcgtttcgatgggttcgatgactttcttatattcatataaaccaggagatggtgttcggtcaggcattaagagaccgtcgatacagaagtctttattacttggatcatcgccgaaatcgccaccgtaacgatagtatttgtgaccttgttcgtcgtaagattcaatcccgtggtcgaaccattcccagatgaaaccaccttgtaatttatcgtgagcgtagaacaaatcttggtaatctttcaagttaccgggaccgttacccattgcgtgtgcatattcgcagagaatatgtggttttttagaatcggcaataatatcgcgcatcaatggttttttagtcgggtgttctaaccaactgtacatggttgaatagacatccacgacttcagcatcaaaatcaccttcgtaatggactaagcgggtcgcatccatttctttggccacttcagccatctttctaaaattatgaccaaaggcggattcgttgcctaatgaccagaataaaatggcaggatggttcttctcgcggctaatcatgcgggttaagcgagagacataggcagtttcccacttcggatcatccgtaatccaatcgtatttttcggtgagttcaaaaccgtggcattcgacgtcggcttcggcaatcaggtacatgccgtattgatcacagagatcatacaaatagtatgaattgggataatgactggtacgaatggcgttgatattgaattgtttcattaagataatgtctttttcaatttctgctttagcaaccactcggccgttcttagggttataatcgtggcggttgacgcccttgaacttgatggccacaccgttgactaagaaagtgtcaccttcgacatgaatattgcggaaaccaactttttgtggaatcacttctaagatttggtcgtcctgtttaacggtcatgtataaagtgtataggttgggtgtttcggcagtccatttagcgaccgctggaatttcggcattaatggtgaaattggcattcgaaacggtctgttcggtttgataggcgagttgaccggttggatcaaggagttcgaattggacggtttgattagcagcctgccgcaagcacgtcgtgaccgttagtcggccatcctgataagtgtcatctaaatcagcaacaacggtgaaatcattgatgccagtttggggcacacccagcaattcaacatcccgataaataccgctgagccaccacatatcttgatcttctaaataagtaccatcggaccattggtacacgcgaacggttaaatcattagcgccaccgatttgagcgagttcagtgatatcaaattcagcctcattgcgggcacctttgctgtaaccaacggagtgaccgttgacccagacttcaaaggcggaatcgacgccgttaaaacgcagaatgattttttgatcggtgaaagtatcgtcaatcgtaaatgtacgtttgtaaatcccggtcggattaatcgtcggaacatagggtggattgatggggaagttataccataaatcagaataatgcatcttgccaaaaccttggacttgccaagaaccagggacggtaatggttgccatatcagtcgtatcaaaatcgggttggtagaaattttgtggactgtattcaggtgcctgtaagaacataaattgccaagtaccattcaagtttttaaaagcatgggtgtaacgattttcatttaattgtgctttggttttagttggaaagcttaaaaaatgtgcgcgtgctgcttgtcgattgatgtgatcgagttgatagttttcccatagtttcataattatttagccacctttttagttttcttttcgtaacgtgcccagaaaatccaagcaaagcccatgaagacgactaagcctaaaacgttgtagagtaacataccgattggactagctgtcccttttggtaaatgaccattcaattcttgcatgattaattgtggatcaggaacggttgacatgaagaagacgaagacgaaaacggctagtaaaatgacgccagccacaatcccgaaagtacggttaccaaacttgaaatcacggggcatatcgtcttttttgagtcgtaacccaatgtaagcaatcaataagaagagaactggcaacaatgaagttgatgcggtcatgttaattaaggtttctaggaaactgttcatatcaccaatgccgagagcggggatgattaagagcactgtgacgataatcccttgaacgaataaggcgttggtcggattaccttcgtcattcgttttaacgagccatttgccaaagaccccttccggaatctctgagaaaaagactttaacgggtgcggccgtccataaagctaacgaaccaaggcttcctaagaagagaatgacaccgactaagcgcgacatgatgtaagcggggatgtggaaatacgtgcctaagatattgaagatatcgaaaatcccgttggagaagttgcctttcaagaccgaggttgggacaatcagaccaacggcaatggcaccgagaatgtacatcaaaccgacaattaaagtcgcaccaatcattgttttaacgaaagttttattgccacctttaacatctttgatgtagaccccaatactttcgccaccgccgaccgcttgtaaaatccaagccatcgtcatgaagaaggtccaattgaggttcggtttaatggttgcggctgagaattcttgagcaggcgccttgccaaagatgaagactacgacgaaggcgagcactacgaaaatgacgcccatgaataaacgggcacttccggcgagactagtgatggttgaaatccaagcgacccctttgatacaaacccaagtcatcacccagaagagtaaaattgaaatgatagcgataatcttagtcccattattgccttcaaaaacgttttgtccgaagaatgcgtacgaaccgtagattaaggtgttcggtaataaggaacaaaagaagaataaattaacgaagaaataagaccaagctccgagaaaggcccatttgggtccgaggacgctttcgagccaactgtgtactcctgattccttttgtgaattagcggatgcaaattcagcaatcattagaatgaagggtagaaaataaaagacggtcccgaagatatatccggggatggttgctagaccaatttgaatactgttgttaacaatgcttggaaaagcaaagactgctgaaaatgtcatcagcattaatgcaactgaaccaattcgttcacgagactttgtttcggccatgcgattcaactcctattactatatttgataaccttaatataagggattcagcatggaaacgacatacgaaatgttgccagttttttgtaattatgttgccattgtgataccgtttacataaacggttaaggaagtgtgctgaatgttgagtaatgaagaagcggatattttggtcaataatcaagtgctgatgccggattttcacgtttacgaagtgggctttgaacactgtcggccgacaaaaccagttgaatacgtgccaattgattattgggtattgcactattgtgtcagcggtgaaggttatttttcgttgacgggaacgaccgaaaaacacattcaatccggtgatttatttatgattccggcccattttggtaatcgatattaccctaaagccagtaatccatggacttatcgctggattgggttatctggacaggctgttcaaaatttattagcacgttgtcagttatcggagaagcaatttgtcattcccggacgttacgatgaagtgcttaatcagtttttcgaagattgttacaaccaatttaaagagggacaccagtttggcgcggttggtgaaacctttgcgttgctggattatttaaaaacacgagaaacaagtattaatagtatgaacgccaatgaatatttgttgttaactatcacgaaatatatcaaaatacattttgctgagaacctgacggtgactaagattgcgcaacaacataatattgatcgttcctatctatttaaattatttcagaaatacaagcaaacgacgcccagtcactatattcagaatttaaaattacaaaaggcttgttcgttattgcggaagagttcactttctgtgacggatgtcagttatgaagcaggttttacctcatcgtcctattttacgaagttcttccaaagtaatatggggttgtcaccgttgcaatatcgacataagtttgtcttaaaataagcgttgaacggtcgatatttttctattcttaaaggaatttggttataatagggctatcaatcagggggtgtttgcatggcaattgaacaagtgattcagacgttgatgcggtatgaagaaacgttagctgaactcggaaagctccaatttcgcgcgcatttggccgtgccattgatgaacgaccaaacccaagagtcggtcttattaaaacggaacaatcggttacgatttcaataccaacaattgcgtcaacaacgcgcgcaattattaacccaaatcaccggcgatgtttacgttcgggcgaaaagccaacgcttaaaggttatcaatcaagagacgccagctaacgctactgaaccacagacccaaagtgaaaaactgcaaaccttattggtggcattacaaaatgaaaaattagatgaaagtaatgccgtggtgaatcaaattttggcctatttattacaacaggcgccgcttgcgtttaaaaaggcgtttaatccacgtgtcgccccagtgactgaattaatggcgagtcggccatttaaattagatttaatgatgcttaattatttagatgtttattttacggaagatgaattaaaacgttacgtgatatttttaatctaccgatatacgcaacagacggtggacggaattgttttttataatgcgcgaacggtattgccgaatgcggaagcggtcggtttttcagcggtggcttatcgctttattttaaatgggcaagggcaatgctttatctcgtataaagggactgaaggcagtatggaaaatccgcaagtaccatcattccggcaacgatttgatacctatgttcgtgagaattatcaggattggaaatataacattgatgcgatgttgattggtcatccacataacgacgaacaattgcaactagctcgccgttttacgcggtatctggttcgacggatggctaagattgatccggcgactaaaatttatgcgttaggccattcattgggcggccattttgttcaaacgttacaactgttggaccggccattcgatgcaggttacacgttgaatgccgcaccaattcagttgaaacaaattaaacattatcgtcccgatttattcgatgaacaaacttggcggcaactttttgaattaacgaaagcggacacgcaaagcccagcaatcgcccaagagatgcgccagttagttggcccgtttgatgaaattcaaaatgattggttcgttaaggatttaacccggatttactttggttttccgtacactttttacattggtacggcgcaatatttaaccactaaaaactgggattacccgttcatcgcggacatcacaccgtatttagatccgacagatttggcgttttacagtcaattctgggggaatctaattcaccatctaaaacgggttgaaaatagtaacggttcgattatgttggcgggactgttaacgtatgggttgcaggcgttacgggatgcctataacgcgattaaaacaccggaagccaaggccatttttaacgattttgcccgttatctctgtgatgctcatatttttaatgattcgccagttgtggttcaagctcatttcgagaaagaattatcgaaaccgcggacagcgctggaagttttgaagggtgaatggccgttcttaagtagtgttaataacgagatggttgaaactgtgatttattgtcatacgattagtggcgcgcggtattttaaatagagattggcagttttgatttgaattagtgtagctgattcagattaaaactgttttttttgttgtctagaaagttaatgccgtaaaagagtttatttatgtatcagtttctgttaatataggggtgtaataattaattgcatgctttattaatggatgcaattaattagggggaaacattatatatttttcaagtcgcagaaagcgttttatagtatgggaggaaatctaatatgttaaagaaaattggtcggctactaggcgtgctagtggtactattacaagtttttatcagcccagtttccgcttttgcacaaagtgttccgagtggaagcaaaacttttcagccaattggtgccagtaatggctcttggaatgatggtattgaattaggtggttcatatctacatgttgataatgctgggattattacggggtttgccgaagattcccaaggtaccccatggaatggacagaaattcaagaatatgacggataatatgattgcgtattgtctaaactttaatcaagcaagtccgaacggtgcatcacaaccgttggatgatttgacagctactcagaaaaaagaattaagtaatttgttaaaattaggttatgttgaaaatggcacacaagtgtataagggccaaggggtcacaaccctaagtaatgttgatgcctttaccacgacccaatggatggtgcacatgatcgtccctacttgggatatgaaacaattttcaattaccaatccacaattagcagcgggtgttgctaatttaacgaattgggttaaggaagatttatcaattcaattagccaaagtcggttcaatgactgatgctaacggtgtttatagtcaaaaatatacgttaacgacccctcatgatttagccggtaatgcaacagttacattgaataaaaacatcgaaggcgctaagattatttcgccaacggggactaccgatattagtgcaactaaagacgttaaggtgaatgttggtgatcaatttacgattacagtgcctaacacaacgccaagcgatgctattgaaatcgtggctaaaggtggcacaacgtcattctcatttatgaaatacgatcggccagctgctaatcaacaacaagcattggtagttggggatgaatatatcagtgatgacgaaacagctcaatctgatatgaagtggtcaacggttaccccagaaattgggacaactgccactgataaagcagacggtgacaaaacggtagacgctgaccaacaagtgacgattaacgatgccgttaaatacacggatttaacaccgggtaaggaatatacggttagtggtgttttaatggataaggcgaccaacaaaccattattagccgatggcaaagaagtgacgggttcaacaaccttcacaccaactgcagcaactggcacggttaatgtgacatttacctttaacgccagtgcattaaaaggtaaaacagtcgttgcatttgaaaaattaatgcaaaatggtaaagaagtgactgttcacgaagatattaatgatgaaggccaaacggtcacgattaataatccaaaaattggcacaaccgcaactgataaagccgatggcgacaaagttatcaacccagatcaaaaagtcaccatcaatgatgccgttaaatatacggatttaacaccgggtaaaaaatatacggttagcggtgttctgatggacaaggacaccagcaaaccattgttagtcgatggtaaagaagtgacgggttcaacaacctttatcccaactaaagctgctgggacggttaacgtgatgttcacatttgatgccagtgcgttagcaggtaaaacgcttgtagcgtttgaaaaattaacgcaaaatggcaaagaagttgcggtgcatgaagatattaatgatacagcgcaaacaatcaccgttagaaaaccgaatgtaccaaacgtaccgaacacaccaaatacgccaaattcaccgaagacgccaagttatccacaaacttcggggacggtggggtcaatcatgacttggatcgtcttattaggtgcgttatcagcaggattatggtactatcttgttgataagaaacggacgagtaaccgttaatcattatttggggtagctgttgaacattcagttatcagatgaatatccaacaaagcgacccataatccccaattaggattgtgggtcgttttaatttagacagaaattaaggtcgttatatgaaaaaaataataaaacgattaccggtgatttggttaattgtgggtctattgggattaacgttagtctttttcggctatcagaatttgatcggatccggtaacaatactggggcgttacaacacccgattgaatcagaacaaacgcgtcaacagattcagactaagcaaagcgctaactacgatgccgctcagattaaacctgtgacgacgaccgaatacgctaaggcccagcttgattatcgaaccttggtcaatcaaagtgggattggcgcattgtatattccaaccgcagctgtccagactaaaatattggcggggatggctaatgataatttaatcgttgccgtggggacttatcgaaagaatcagcaattaggtcgtgataattatgtggtgttggcgcataatctggtgcaaggcggtggtccgctggcacagttaaatcaagctaaggttgcagatatgatttacgcgaccgattttgttaacgtctatgaataccgagtcagtattcataaaatcgaaaatcaagtgaacggtgaattgttgcaagaacccgttcagggggaatcagctaaaataacgttatttagatgcgaaggcgccttaaatacccccaatcgaatggtcgtccaaggtgaatttgttaaaaaatatcccgcaaagcaggcgacaactacgattaaaaaagggttggggttagtgagtgccacccaacaaacgacacaaactaagcctcaaacggccgccgataaaaatcaggtatctcagccacaatccgaagttgttgaacaatttagccaacctcaatcgattcagaagacggtgcgtgacaagacggtacaaatttttgccattgcccatgagttttcttacctgttagcaatcggatacttaatcattctagttggattgattaaaatcaaaaataaattgaacgaataggagacgaccacgatgttgattcggaccattgaaccgcaagatactttgaacgttacggctttaattcagacggctttcacagcgagcgaacatggctatggcggtgaggtagggttagtcaatgaattgcgtaaagatgccacttaccaagccactttagaagtggtcgctgttgatcaacagacgattatgggtcatggtttattgagtgagattcaaattggcgagcatcgcggattagcccttgcgcccttagcggttctaccgacccagcaacgtcaagggattggtgggcaaattattcaagccttagaaacacgcgcacaacaagcgggttatcggctaatcagtatcctaggagacccacagtattacagccgttttggatatgaaccggcaaacgattatcaaattaccgcaccgtttgaagtgccagctgacgcgtatctcattaaagcgctagtgccggatggattaaacgccgtgcatgggatggtcagttatcgacccgcttttgggatcgaatagtgatagtaaagcaagctgtgacagaactcggttatcaattgagtatcaagttggaaaatcgcctatctcgaaactaaggatagacgattttttgatttgaccggaaattgatgagttctgacgcgcgtcgaggaagaatgttcacttaatatcagaatactaaaacctatgtcacagtctcttttttgtagaacacctgattaatttagcctattaagcgtctgcaactaatggtaaaattagagatagtaaatgtaattcaggtggtggaggggaaatttatgtattgcgaacagtgtgggactaaaaatgaaagtggttcagctttttgtattaattgtggggccaaactgatacaagcgactagtgtgccaattgaaccagaaccggttaagtcggctgaagagaccaaacagttatgtccagtttgtcaggttgcgtatgcgcccggcagtcaattttgtgaaaattgtgggcatgcgctcggccagccaagtggacaagtagcaaaagccactcaagcggcggaaccgattagtcgccaaacgttaaaacaacaagcccctgcgcagcacaagcgactttggtggctggttggtggtatagctgtcatcggtgtggcggttggcgctggtttatatctgaatcaaccggctagtcaatcagtgaagcaaccaaccagtacgagttctaaaaaaacaacctcggcttttaagcaatcggttaatgcggctgaagcggcgttggcacaagatgattacgatacggcattagaagcttacgatcaagcttggacaacggggactcagacgcaacagcaaagtattaaagcgaaacgttcagggttacaagtgcttaaggatagtcaagccttggcagatcaatcagattatcaaggggttattgataagattgaggatagcgggttattgactaaaaagggcaatgtcgcttatcaaccccttcagaaattatataaaacagctaaaacgcaagtgacgtctgaaaaaccattatgggggacgagccaatcatctgaactatcaagtttcatggattcttggggatcaacgatgcaccaaagttatcaagaatacacagatgttgatagtgttgatatgtacggaacgcaattacccgccgcgttattatcgggtgatctcaaaactgaagttgacggtcaaattgttcaaatcaattggtcagatgacggaacttctgagagtggttatcagattgttgcagcctattcagatgctaatacggccgactatggcgctaaacatttttatctgtttgccattgataatggtcagccgaaggtgttgattacgatgcaaaatcagggtaataataatcattcgattgaattcaaagaaactgagaatcaaacacttaaaaatcgttttgctgaaattgttaatgattcaacagattaggggttagataatgacattacaacgcaaatatggtgtggggctattgttgtgcgtggctgtcgtgttgctcgatggcggttattattaccaacgaactcaaccgacggcggtgcaaaagccgagtcaacgaactgttaaaaaaagccgcgctaaagtcacacatcaaaaagccactcaaaaaagtagcgtcatagcaccggtacgtaagacggcaagtgaacccttgacctttgatagtcaacaactcactgccaatgctggacaagtggggtatggcatttattatttgaagaatcaacgggcgagctattcgaaccaaaatcagccattgattgctgctagcgtgattaagatttttattatgggttatttgtatcaacagatggcgcaaaaacagttagcggcggatcaagtcgtgggggattcgaccgtgacagcgttaataacggcgatgattcaatacagcgataataacgccacgaaccagttaattgattacgttgggatgcccaaaattaatcagtatttacaagaacaaggttatcaacaaaccaaacttgaacgccggatgttggataatgcggctcgtgcacaaggtttagagaacgtgacgtcggtgacggatacggtgaattttttaaaacagttgtatcaagatcaaacgcggtatccagccaatcaaatgttggcgattttaaaggggcaacaagtgcggactaagattcccagtcagttgccggccggaaccgtggtcgcaaataaaacgggtgagttagcggatgttgaaaacgacattgggattgtctatcgaacggataatccgtacatcatcgtggtgttaacgaatcaggttagtaatacgagtgctgaacgacaagcaattggtcagttaagtttagcggcttttcaaatggaaaatacggaggaatagaaaatgaaatattgtccgaattgtggtcaagaagttaaggaaggggctaaattttgccctaaatgtggctcggatttaagtcaagtgacgctcaaacaagaaacaacgactgatcaaactgaatcgcaaaagactgaattcaacgcaagcgaaccggttgaattgattctggaacaagctgaaggcttaaatatgacccgtgctgaaatgaagaatgaagcgcaacgcaagctttcgggtcgttatggtgaatggtttaagagtattttatgggcaattgtcgggattattatcagttcgctactagttattgttgcgtctggccaaatgtcagcaggatttgtgaaaattgcgctgtatcggttatacggtggaacggatagtcaatttggtacgggtctattgatcttcttctggctgattattctaattgctgcaatcattgcgctatttttaattgggtgtttattgaatgcggtcatgcaatggtgcgctatctttacactaaaaggccaacgcgcggatggcttgaaggttttcaattacttcgttaaggcacaaaaaaatcgcgtcctaaaagcgaatattttgatcagtctttatcaatttttctggtcactgctatttatcattccaggaatcgttaagcaagcttcgtacgtaatgactaatttaatccttgaaaaaaatccggaattatctgcgagtgaagcaatcaatcaaagtcgtaagatgatgcacggttacaagttagaatttctaattttgcaatattcattcttcttttggcgaatcgtggcgggtgtaacttacgggttagctgatttctacgtgttgccttatcaaaatgtgactcaaatggccttcttagaggtcctttatcaaaaatatcaagactaatgtaagtgctggttcaagcgtctaaaccttgagcataacaatagaagggtaattatggtgaactggacatgattacccttctgtcgttaggcggagaggtttgcttgaggaagcacgttaaaaattgaagtgcgttgagttgcgggtagcaaccgagcattaactgaaaatcaccggttatcttgaacttaagataattggtgattttgtagttaaccggaaaaggctacttgagaagcacgttatgatctgagtgctgactcagccgattaacttctgagtatagcctagaattgtgagtgatggcgcgcgttaaaaaaagccagttaatgtcaatacattggaattgatgttgcagactttttttgatgaaattgtggtaggattaataaaacaaaagtttatagaacgcgaggcttctagtgatggacatttatttaaaacaagcaatcttacaggtggtcgatcgggatgttggcagcccagtattttcgcaacaaacattggatttaaccagcgacatcacgcgggattatctgacgaacaaggttaaaaaattatcctctgctcaaagtaaaacggggatcatcaaagaagaggccagtctgttacaattgattgccccgcttgaaacggactttatcaatgtcagccaacagttggttgaaaagtggtacgcgatttatcaaatgagcgatgatgcaccgagtgctgacgtttttgtcgtattgtatgaacaagatgcgcaaccttatttggcctttttaaaagtgaattaccaccaagcctatacccactatgtcgatgctgaatctggcgaattggtcaatcagttgatcattcaccaatcaatcctctctagcaaaacccaaaaggcggatgaaggctttgcgattaatttagcgagtcgccaatttgagttgattgagaagcaatacctattctctggcgagaagcaattttacttatcccaacagttgttagaagtagaacccgccccttcattggaagaaaatgtccgggtcgttaaaaaggccgctgaaaaaattggtaaacgattcgaagtcgctaaacacgatgtcgtcgctaacgtcaaagaagcgatttacgcaacaattgaagccgatggcgaattagatacggcagtagttgcggaaaaaatctttaaaaacaatgtttcggcccaaactgaatttaaagccgagatgacggataaagcaccggccgttagggtccccgtctcaccagcggttcaagaaattgcggttaaaaaatacggtaaacagaagttgaaattatcaaacggcatcgaattaatcgtgccaatcgaagtctatcaaaatccggacctcttcgaatttatcaataatccggacggtacgatgtcagtcgccattaaaaacgtcgaagaagtgattagtagattataagagcgctgattgctgccgggagattttgagcattagcctagtcatgtgaataaagctgggttatagctttgtttgcatgacgtagctaggcgcagaaatctggcagcaaaagcgcgtttcaaaatagcacgtgagttttcatggtctattttggactataccactgatggcgttatattttaaccgataggcagcgcttgcaacccaagcaaatctcacttatagttaaaagagaatctgcacaggaggcaatgagatgattgagaaacgcagtttaacggctagtgatgaagcggccttttatgaattggcccaatacgcctttaataaaccggacagtcaacaacgtcggggcttttttaaacagttataccaaaatagtaacggctttggcatttttgccgatgatgatttgaagagtatgttgttagcaacgccgtttaacgttaattttaacggtcaaacatttaaaatgagtgggattggttatgttgcgagttatcctgaattttcaggacagagcggtatttcagcgttaatgaccttagcgttcgaccaaatgcaccaagacggggtgaccttatcctacttagcaccattctcgtatggtttctaccggcgttttgggtatgaacaagtttttgatcagacccattttgaaattcaaacgcaagatttgccacgcttaaaattccccaaaagtccgggacaagtcactcgatattcagtggcggatgctagtgatttaatcgctaactttcatgaaacgcacccgttgaatcaagttggtggggtccaacgacctgattggtggcgtcaatatcaggtgatgaaacacccagaccaagaaatagcgatttatacggatagtgaagaccaagttggcggatacgtaatctatagtcgtcagggttcggtgctagtcattgaagaattgatgacgtcgacggttgcgagtcaacaacaactggttaatttcatttttaaacatcaatcggcctacacgacgattcgctatgaaagtagtttgacgactgggttagctgacttgctcccggatccaacggtgttaaagacgaccgtcgtaccgtatatgatggcacgaattgttgatttagctgatttcttggcgcgttatccttatcaaacggatgaattagcgactgtcaccattgacgtgaccgacgactttttaccggttaatagtgggttatggcaaatcagcttgcacgacggtcaaccaacgattactaaattggcaacgggtacggctgacatcaccgtaacgattcaaaacctaaccaaagcgttaatggggtatcggtcattaaccagtttagcgcaatacggtcaaattgaaggtcaaccaaccgctattcaacaattggaccaggccattagccacgaaaaaccaatgctgtgggactatttctagagtgttgactgagctggttagcttctgagtatagcctagagtaggaaattatgaccgagttttggtcatgattccctattcgtagctaagcacaggaatctgtgaggacgagcgcgtttcggaattcatcaaaaaaggtccgttcattcctcaataggaggagtgaacggacctttttaatttgatttaattttagctagcaatgatttggacgtcagcggtgagtacaccggctgacggaatatcgctactggccattgcaacgtctaattgttgtgaattcgaagcggcgaacgagccggtatcattaacggtgcgataccaaacttcaccggtcgacaatgtaattttaattttagaaccgcggggaattacgcctaagtgagcggcaacaccagaatacatcccaccaggcatatcggttgcgcctaagacggcgggatcataaaaggttaacttaaaagtccctttatcgattaaagtgggttgcggtgctggctgtggtgcagtcggttgaacgaccggcactggtgctggttcagttacttctgctgaactaaagtcgggttggatcggacaatcggcctttttaggggtaacggttttcaccggttgtggggtttcttgaggcccgcaagcttctttaatcgcttgggtcgagatgaatttttggacgggttgaatcggttgtgctgaagcctgactgggttggaataaggtgaatggactgaaaagaatgatagcaatcaatgcgatagccgcagtcgttaggccggcaagtaataaaactcgatttttaataataagtggacactcctagacaatatttggaactagatgagtatagcaagctagcatgtcaattaaatagcagtttctttacagaaatggggtattctgtcatgttagtcatcaaactgtaaaataaattatgttaattaaagccgataaccattaccactaggactgccactatcgtatttagaacgctatcattcatttttaggaaaaacaactaaaaaagccgtcaacttcggttgaatgaagttgacgactttgagaattagatgagaaaataaccaaatgtccctagaatgattaagaataagaagttcatccccgtaaagacgagtaagaatttaccaatatccttgccccagcctttcttgaatcgcttgaaagcaattaggttggcgagtgaagcgaacatcgtaccgacaccaccaatgttgatggctaagaacatggcgtgggcgtggttggtgaagcttgataacagaatttcggttggcacgttggcaattaattgacaactgattaaaccggttagatacgtttgtttagcagtgccgacaatcgaacgcatgaacgttgcaatttgtgggatgtgacttaagttcccaacggcgatgaagaaacagaagaaagtcagtaataaaccataatcaactgttttgaacagcttgggatcaaagaccatgattgcaataatcaccagaataggtgtgatccataggggaattagtgaaaagacagctaggaaaacgactaccgttaatggaatgaaataccacagtggacctttttcgacttcgactgggtgcaggccgtgtaatttaatcggttctttcggaaataggaacgtcgtcgctgttaataagatgatactgacgattaaaacggggattgaatattcaaagaaatggcgaatcgttaatttatagaatgagactaagaaaatattatgtggactaccaaacggcgttaatgaagagccgaggttggccgaaattgtaatcagagtgactggtaagattggtgagaattctaactgacgtgcgattaagataaataatggcacgaaggttaaaacggtcatgtcattggttaaaaacatcgcgccaacaaaagtcagggctaacagcatctgcatcagtgcccgttttgaatggcttttgataatcagctcacgagcgaagaaatcaagcacgtgtaaccgttgataaacttgaactaaggtcataatacaaaaaacactgactatcacgtggaagttgacgtaactaagatgcggccggttgaaaaatgaagtaacgattgcagaaatcgtggcagccaatagaatcttatcgtctaagaaaaagtctcgaacgttcaaagcaatttttttcatgtaatttaagttatccttttatctataagattaaaaaagcactaaattaattttagactgtttagccggataaaaacagaaaaatttacaatatatacataacatttacaatcgtgaaagcgaactgctagtaaaggccgttgacaatttgtgctgataaattgtcccttgaacgcgtgattgtaaagatttaaggcgtgttaaatgcactttagaccgattcttagtataattaagatgaattaagaatcgatgaaatgtaggtgattgcgatgaaagacgtttccagaaaaacagttattttaggtattggtgcggcgctattgtcgatcatttgtttgatgctaattttaaatacggtgttacacatgaccttttggttggcgttgttcttgagcacgattgccggattatatctgggctacaacgctttttatagtacgtatttagccgaaatgattaaaatcgaagttgctaaccaaggcttaacaagtcgtgacttagccgatttaatgcacggtaatgcgaaggaatacccaatcattcgtggagagttgcgcttaattattccacggtataaacgagcacagttactcgccaaactccaatcgcggattcgctaagctttttgcaccgttatcggaagtgtgttaggatgattttaacgaattgaaaggtgtcgattacaatgacgattgaacgtccactgattatgaaacttcgctctgtacatttgaagatgacgcatcgtgcagagcctaatcgaaatattgaaagtcatctatagaagaattgtgcttaataaacgctcaagctagtgtttatttcgtgacggtcttctatagataatcttattcagtgttgtaatcgaaacagggacagctagatgctggccctgtttttttatttgtgaaagaaagtaggaatgaaaatgagtattttaaaagttgaaaacttgagtcaacaatttttggacaagcaactttatgatgacgctgggtttcaagttaataaaggggaacatatgggcattaccggtcaaaacggggtcggtaagagtaccttaatcaacatcttgaccggcgcgattttaccggatgagggtcgggtgacgtggcaaaagcaccttaagattggttatttagatcaatacgctaaattagcgccaggactaacgatttttgaatttctgaagacggcctttgatgagctatatgttaaggaagcccagatgagtcagtattacgctgattatgcggccaactatgatgacgaactcctaacaaaagccggtgtgatccaagaattattggaagccaagaacttctatgaaattgagacgcacgtgatgcaggtcgcaactggcttagggattgatgcgctagggatggatcacgatgttgcggcgcttagtggtggtcagcgttcgaagattattttagcgaaactactattagaagaacccgatatgttattgctcgatgaaccgactaattatttagataccaaccatattgattggttgagtgattatctgaatagttttgagggggcgtttatcgtcatttcccatgattatgatttcttggaacgggtcacgacttgtattgccgacattgaatttggcaaaattacgaaatacacggggacgctccaacaagctttccggcaaaaagccgacaacaaggccagttatatgaaggcttatgaaaatcaacaaaagaagattgaaaagaccaaagcgtatattcggaaatacaaagcgggttcacgttcaaccattgccaagagtcgtgagaagcaattggcgcatttggaaatcctgacgccacccagcaatcgggtcaaggcgaattttagatttccctatcacgcgacggctagccagattttattaacgaccaatgatttagagattgggtatgaacaagcactattgccagcgttgaatttttcaattggtcgcgatcaaaaagtcgtacttaaagggtttaatgggattggtaaatcaacgttattgaagacggttctcaatcaaattccagcgattgcgggtgattttgaaatcgccagtaccgttaagtttggttattttaaacaggatttgaaatggcccaataatttagcgacccctttacaatatttacaagcagaatatccggaacaaaaacaaaaggaactacggcaagttttatcacgaacgggtttaacggctgaagaagcgatgaaaccgttgaaacagctgagcggtggcgaacaatcgaaggttaaaatcgccgaattattattaacgtcgagcaacttccttctattagatgaaccaacgaatcatttggatgacgataccaagcaagcgttgcgcaaagcgattcaagaatttgagggtggcgtcttactagtgacccacgaagaggatttttatcaaggagattggattgataaggttctcgatattgaatccttgattaaagcttgatgattaatttttaatatatactgaatcgatgtttgacaagtgttaagatattgataattaaccaaatggtggggaaataatggataaaattgatgtaacaaaattaacgcagatgtcgaacttcgaaatagcagcattgttctataagtacgccttaacgaatagtcggggcttgcgggcgattaatgtcggccggggcaacccaaactggattaatacgcaagcgcgattagcacttaatcgaattgttgaatttgggatgcaagaatcattgcagacgattagcttagatgacggtaacttagcgggctatactgaaaagactggtattgcggaacgctttgaacaatttttggatgccggggattcggtggatggcttcttaaaacaggctttacgctatacgcaagacacaatgcaactcaaccaagacgaactcgtttttgaatgggtcgacggtgtgattgggaatcattatccagaaccttcacggagtttggtgaatgttgaaaagattttgaatcgctatttagaagttaatctctatcgtggtcgccatttagcggaccaaacgcaagttttcccaactgaaggcgggacggctgccatggtttatctatttaatgaactcaaagtcagccatattttagaagctggcgatacgattgcgattaatacgcccatttttaccccgtatctccagattcctgagctcaatgaatttaagttgcaagaatttgatgtgagttctgatgaatctgatgactggcaattagttgatcagaagtttgaagaattgaaggatccgaatgtgaaggcgttcttcgtcgttaatccaacgaatccaacttcacgggcgtttagtgatcacgccttagaaaagttgaaggaagtcgtggctgctaatcctaaactagtaattatcacggatgacgtctacgggactttcgtcgataattttaaaactatctattcagttgtaccgcataatacgttgctcgtttattcgttctcaaaattatacggcgcaacagggcaacgcatcgggttaattgcgatgcatgaagataatctttttgatgaattgattgcgcagatgaccgctgaagatccggttattaaagaagctttccgcaaacgctattcatacgtaaccaataaaccacatgaaatgagttttattgatcgaaccgtggcggatagtcggaatattgggttgtaccacgctgctgggttgtcaacaccacaacaaattgcgatgacgttgtttagtttgacgaacttagtttacgaaggacaagctgatccatacgtgcaagcttctaagaaaattgttagtggtcgctataaggcattctgggaatcgttaggattggtgacgcagacttctgatgaaaatgcagaatattatacggttttcagcatctataagttagcggaagagaagtacactaaaaaattccgggcatacttagaacagaattgtcatcatctagaatttgaatggcgattagcagctgactatggcgtggtcgtgatggacggtgctgggatgggcactgatgtgggctacttacgaatctcgctagccaaccggccgattaaagattatgaaacagtcggtggccggatttctgatttgctagcaagctactatactgagtatctccaaacgaaagcttaatcagatcattatagtgacgcctagtcccgacaatcggactaggcgttttttagtattttggaagaatagtcatcttttattaaaaaaagcttgacctggcgctttcaggttggtaagatataaaagttgtctcgcgaggcgctgttgaaatccaacggcaccgaagatgaaataaatgtttttcaaaaaaacacttgttattaaatcgaaagcgtgataagatattatatgttgcttaaggcgttataagttttagcttctaaacaacaaaaacaattttaaaaagtgtttgacagccacaagtcaattatcagattgaacagaaaagtagattgacagctgaagtagttgcagagctcaaagattactcaaataaacaatttcaaggatagtatatgatacaaaattcatcattagggtaaaaagaagtgtttggagatacggtaccttatacgataaaagcgacctatccatttttatttctgctagacaatatctctgtgaaaatcggaattgaagggtaagcgccttctcaagtgagttgaagatattggaaaagatttttccttagtgttacggctcgttttcagtttagtcgtgggtgcgcttcttcttagagtagtcatttattatcaagacatcataaaagttgcatggaaacagtggcggatacagcaaagcataggaatgtgaaagagataatagtagtattatcgctataaattatttataattaagatggaagtataaaatcttaggtagtgctatttaaattttgtttaagaatagatatcatgtttttttgaggaggaaagaaatgaagaagaaaaaatcggtctggtttatgatggttgctattttgatgggctttatcccgccaatcttgattgcttgttcaagtatcgcacatgcgatagaaatccagccggataaaattgtagatcaagcgggtttaaaagtcatttcctctgtttcatcagatggaaattctttaaactgggaacttcaatatgaaaaaagtgtagcaagtgatggcaatgatcaagcactgaaatttaaagtgacggctgatggagaagcaatagcttttaatgaagatgccagttttgctactaatgatgaccaatggtttgtggaaaaagatttttcgaaacaatcgcagggttctctttcatttacaacggtgctaaatgtctccaaggtagctcttgaaattcaagccgatgcaacaaaaacggatgaaacacaagctgtcactattaacaagaatattttgactagtgcggtagaaggtccgcatgcgttgaaattaccagcagtggctacacaaaaaacgacagaagtaagtgctacttctcagacaacagctgaagaaaccactagtagccaagcgaccgaaacgacgacacaaacggaagaagccagtgaagcaacgtcgtctgagataaatgcctcgctggcaacagtgggcgctagcaaacttgaatatcttagtggaataagtgcattttcttccattaattacagcaatattgcgccagaatatacgacagatgccacaaaaggaacttatccgactaatagctggcaaccagctgggcaaacaaatgtgatcaaccaccaagggaacaaggaacgcaactttgccacttgggatggtgtaactagctggaatggcgatccatcggacacaacgcattcttatatccagtatggtgaaaaacaaacagattttgccattcgtaagtatgccaaagaagcgagtgaaccagggctttacgacgtttatttgaatgtaaaaggtaatgagcaacaagatatcaaaccagttgatattgttttgatagtggatatgtcaggaagtatggaatcgagtcgaagtaacggaaggaatgatcgtgctggtgcagccagaaatggtgtgaaaaatttctggcaaaccattaaagacgcaggcattggggattacgtcaatgttggtttagtcggattttctagtccaggatatgtaacagggcctgacggttatcttactgtaccgataggtaaagtttcggatactagtcatataaatgcaatcaatgatactttaaaaccaaaatttacaggaggcacttacactcaaatcgggatcgagcaaggtcagcagatgcttgcgggaagctccaatgaaaacaaaatgatgatcgtattgaccgatggggttcctactttttctaagaaggtaaccgctgcgcaaacgattgatgggactacctatgctactgaatttggtaatggattggatgaaccaggcactacctctaaactcaatcgtagttatgaggttggttctgggggaaatagaacaaatattgatagtacttggccggccacattaggagcagctaaaatcgccaaagatgcgggcttaactatccacacgctgggaattcagctgagtaaggatggaaattttttaactaaacaacaagttcgcgatagagcaagtcttatcgctacaccgggtaaatacaaagatgctgaaacaacagacgatgtttctgattatttgaatgaagaagctaaaaatgtagtgaaatctttgaacaccatagtcaatggttcgatcaatgatcctttgggtgatcagttctcttatgaaggcactccaactgtgaagagcatcagtacagaggatagtgctgtaacgaatttaccgaccgtaaaccagtcgaatggtaaagtgaccactactgagttgaacttaggcaaagatcaagaaattcagatccattatcaagtgcgtatcaatacagaagataaagatttcacgccggaaaaatggtatccgatgaatggtcaaacaactttgacaccaaacggagacaatccggataataaagtagactttggcgttccttccgcaaaggcaccgggggtgaaactcgatctgaaaaagatttgggaagaatacgataaggatacgagtaaacgtcccgattctcttaatttcaccttgaaccgaaaagataccacagagagcaattcttggaagcaaggttttattcgtctttctaaaagcgatgttgctacagatactaatgtctgggaaaagaccaatattgaaaaagtagccgaaacacaaggagctactgaatcgctttggttgccacaattcaacaacaaagggaaagattttgcttatagctttgaagaagcaacggtcaatggctatgaatcttcaagtaatgctgctaaaaccatttggaccaataaaaaaatctacacaccacttgctttagagatcactaaaatttctgatcaaggaaagacacctcttaaaggagcagtctttaaactaagtggaggtagtttgccaaatgtgggcgttgaacttaaggacaacggggatggaacctatacgttgtctgatgataagtacaagctgcaattaaatactgagtatacattgacagaagttacaccaccagctggacatacggctactacaactagttggaaagtcaacgttagtgcagaaggtaaagtaaccatcaacgatgctgcgacgggtattgaaatcaaagacaacactatcaagtacaccattgaaaatgagtttaccaaacgtcctttattggttgaaaaatataataaagatagtggtaaaacattagacggtgcgaagtttacgttgaagcaatatgacgataagtggacgaatgatggtaaagttgtcggtgatgatttgatcggaagtgatgccaaatcttttgctagactggcaccaggctattacagcttggaagaaacgacggtaccgacaggctataaaaaagacgatacagtctttaagttccaaatcgatagcgctgggaaactacttgatgcaaatggcaaagaaatcaccgctaactcaaaaccaatgacagatggtttctatttaacgagtgataataagattgttttaatcaaatacaatgaactgcgtgattttgacttttcaattcttaaaaagaactcgcaaagcaacaaaccattagcagatactgaattcagcttagccacaaaagaggattccaatacgcttttggctactctgaagaccaatgatgaaggaacgggtcagtttttagatgcttcgggtaatcattacggtgttcgtccaggaacttacgttatcaaagaaacgaaagcaccagaagggtttgtccttttagaagggactttcgaggtcactataaatgcggacggaactgtcggcgacgtgacttatgatggtaaagatcttgataaagatgctatcaaagtaaatctaaaagatgaggacaataacgtcatcgaattgacggttgctaatacacccaaaggacaactgccagcaaccggcggatcaggtatacagactttcatcatagtagccttggctcttgtcacagcagcgggtgctcttacgatctgctacttctaccgtaatcgaaaggagttgaactaagatgaagaataaatcattgttcatcaaaatcaccttacttctttcaactttgctggtagggatctttacggggcaacggcaacaagcctttgcggatgatgggacgatcgatattgtgatccaaaaaaaattgtgggaccaagcacctgatgcaactattcaaaatacgggagcggccgatcaagatatcaaagatccaatcgaaggggtcggctttacgatttatgacattacagaggattattataaattgatcaaaggctctgacgaaacaacaactattcaaatgattcaagaaaatgttgctgattatcaaaaaattatcagagaacaaggcctgactgatgaaaaaggcacaatcaaatttacccaactacctaaaagcagtggcggtaaaaatgcggtttacctgattgttgaaacggcattgcctgatcctgaaaaggtaaaagtcgaaaaagcggccgaacccttagtagtggctttaccagtatatgaaatgagcacagacggtaaaacctatacggacaaagaattagctaccgttcacctttatcctaaaaatgtgggaacaatcgttgaaaagccagtgacaccaactaaacctaaaaaaccaagtaaaccgaagaaacgctttccacaaacaggtgaagcaaaatccttcctaggtatattggggattcttttgatcggtacggcgatcattttatggcggaaacactctgtacgaaacaattaatcaaaggtacaaaagactaaggtctattggaatattgtacaaaaaataaaggaggaattagaaaatgaagaaattatggaaaacactttttgcagcactacttgtagtacctttattcaccggcgtgtttggtgcgaaaacagtaagtgctgctgaagcaacaacgacaaatgtaacgatcaacaaacgaatctggaaagatggcgaagctccagcacaaggttccatgcaaaatactggggaagaaatggactttggtggagatccacttgaaggagccggctttacagcctatgatgtaacagatgcttatcttgctctgattgcagatggtaagtcacaagcagaagcaacaaaagaaattgctgataatgcgtcagattacacaactgtagcaaaagcagaacaaaaaacggatgccaatggtcaaacaacttttgaaggacttgctttaaaagacggcgacaaagataaagtctatatgtttgttgaaacaagcacaccaggcaatgtttccgtaacgacaaaagccgctccactcgttttagcaatgccaatctatacgtttaaagatggcaaatattcagatacaatcaacaccaacgttcaagtctatccaaagaacgaaaccaagactgataaaaaagaagttgcgaatttagataagttcactgaagttaaggatgctgatggaaatgttttatatcataaccttacaactggcgatgaaatcgaatataaattaactttaaatattcctgcggacattctggaagatggcgtcacttactctgtaactgatacgccaactgctggacttgcttatgtaaaagattcttttgcagcaactggtttagtagctggaactgactatgaattagctgaagattctgcaactggcggatttactgttactttgaaacaaagtgaaaatgtaggaaaattagctggtagtcaattgattgctacttacaaaatgaaattaactgctgaagtaaatcctgacgatttagtaaacaatagtgcccaagtaacaattggtaacaaccctcaagataaaattacacctccaacacaatttggtacaggtggttataaattcgtcaaaaaagattcgcaatctggtgcaaccttatccggtgcggaatttgtcgtaaaacaaggctctaactttgcaatatttgaagatgctaaaaacactaaaggtgaatatatctttaaagaatggacgactgatgaagcaaaagcaacgaaaatcgtttctgacgacaaaggtgagttgaaagtaattggtttgaaaaatggtgactatcaattagaagaaaaagcgacttcaagtgataaatatgtgttacttgatgaagatgtcgatttcactgttgaacacggtcaatatggcagtcaagaactaaagtctgttcttaacacgcctaaaggtctgcttccatcaacaggtggtaacgggatctatgccttcttacttatcggtgctgctcttatgatcggtgcttacgcttggttcaagaaatctaaaacacaagctgaagtctaagatatagttttaaaatagcaaaaggcagcttcatttcttgaagttgccttttctttcttttaaatagggagaaggaggtgcaagcatggatcagcgccaaaaaaatgaacggatcaatttgattttaaaactgctaatggcgattttatttacgaccggtgccattattttcagctatccctttttgtccaatgcggtgaattcctattatgaccaaaagatgatggaaaaaaacttggctgagatggccggaataaataccaaagaacaagcaaaaaggtaccaagaaatggccgaaaaaaataaagagctagctgaaagtaagaacatgaccaatattcctggcatgggactggtagaagacccgtttgaaaatgcggtcgatgatgccaaagatccgggtaaagcctattatgaagagcataccgtgggtgctatctatattccaaaaatttcggtcagcttacctttatttgatgaaaccaatgctgctcttttggaaaaaggcgcgacgattttacaaggaacgtcttatccgatcggtggcgatagtacccattcggtgatctcaggccacagtggcttgacggaacgtaaactttttacagatttagaaaagttggtgattggcgatgatttttatttgaccattgctggggaaaaattggcttatgcggtcgatgacatccagatcgttttaccgtcggatatcgacaaagtggtcatccaaccggggcgggacttggtgaccttactgacttgtacaccttatggcatcaatacccatcgtttattagtcactggacaccgtgtgccttatatggaggaaatggcggaggaagtgaccagtaccaaaaaagcggtcgaacggcgttttcgcttgtatttactactgatcccgcttttctttgccatgattttctattggatgtatcgcaagttcgtctattatcaaagtggcaaacacagttatgacttttgtttttacttattggaaaatggtcaacccaaagcaggcgtgacttttaccttagtccgtaaaaaacgctgggcaacagatgtcactaaccaaccagttgctgtaagccaggtggatggatgggtgtctttccctgagatcagagggggtcgttattatgccaaggcgatcgatgggtcgacaaaaccagttaagggcaaggtccgccgtttaaaagatcggcagtttgttttaagcagcgtcacgaagaaaaagcaaggtaagaaagttacttattatctggagaatggagcgaaaaaatgaagaaaaatcggcaaatgatctcgcaaattgcgatcatcctcatttttttggtcggcatcttgaccatgctctatcctttttatgtcgatgcgttgaataatgtgatcgatcaagtgcgcgtcgatcgctatttgaaggaaagccagaaagaatttgaagccgaacgcaagcgactggcggaagaaaataataaattgagcgacagcgggttagctccgggtgccgatccgtttgcgaatccgaatggtggtacggtttcagctgcttattacaaaaagcatttgattgggaccatcaatcttcctgatttggccattgagttaccgctatttgatacgaccaatgatgatttattggaacaaggtgcgacggtcctagatggcacgtcctttcctgttggtggcgcaagtacccatgcggtgatctcggctcatcgtggcttgccagaacgggaactcttcaccaatctgccggagcttaaaaacggtgatatttttctgctaaatgtcttaggggaaaccttggcttatgaagtgtttgacagccaagtcgtgacgccagatcagacttcggttttaaagatcgaaccaggccaagacttggtgacgctcatgacctgtaccccttatatgatcaatagtcaccgtttgttagtcacaggaaaacgcgtgccatatacaccggctgccgagaaaaaacaagtcaaaggcgatcgttttcgtaagttgaaacaaatcgctatcttggcggggacggccctgttgatcttagccgctatttatcaattgtatcatgtgatcgcccgttaccgattgcggaaagtgcgttttgatttcactgtttgcttagaaggcgtggcagaacatacgccaatcgcactctatgataaaaaagggaaaaaagccctgcggcgtaatggaaaagcctatcaagaactaacagatcaaaccggacaagtcacttttaccgatctaccaggggattgctatcgtttgaaattgggcaagagttggttggtgcagtttggtttgaagaaaaaaaagaggccatccaagatttggaagataaataagaaaaaagttatgttaaaagaagaaagaatactagaagtcaaataaaaaatgctcatgttatcaaatgatttaaatccataagatacacgtttcattgtttaatatgggtattcttagcttctattttgtcattggtatggggataaatcaatgcacttcgtataccttcgttatatttgagtaaattttgtagttttttctaaattcttcgtctaaactttctgtaagaagtgggaatttaggtgcacggaaactacaccaagttttttaatattccatctgtttttagttaagaaacgccaatttactttcagtttctgtgcttcatttttgagcccttttaattgcagctttttcatcattctcacacgaaaggcttgaaacggatgttccagtgacctcgtttagagcgtacatttattcaagaaagtttaaataagatatcaaaatggccgaaaacagacacacaactcgatttattttttagggtgaaggagagagtagcacgaaaacttttagttggcttagactgaacgaagttatggaaaggctactaaaacgtcgagggcagtgagagcgaagtgaacacttgatcttttgaatttttaatagaatcttagactattatcctagtgaacttttttctaatacttgactttctttgtatgattagaaatccatatttacctttaacggaaagaacttttttatattattttagttttaactacacccgttcatggatatgctattattcaagaaattgataagttaagtgatggatcagttaaggtagcagcaggaactatgtatggagcgattgaaaatttacttaagattaatttgatagaagaaattccaagtagacctcatcgtcgcaaagagggcaaaaatccctttaagagatttttgccctctttgcgacgatgaggcctttgtttttcgttctcgttttttgtttgattaactagaagggattaaaagactgcgttttgatttatttttttagggtaaaggagagagtagcccgaaaatttttagttggcttggactgaacgaagtgagggaaaggctactaaaacgtcgaggggcagtgagagcgtagcgaacacttgtttttttgaatttctatctttgttaggtcaatagagtataccctaatggtcttttttatttctgtgctatactagggattacaagtgttcattagaactgtccaaaaggagaattggaaatggctaaaatcggttatgcgcgtgtgagttccaaggagcaacatttagatcgacagttagcggctttaaaagacgttgataaattatttacggataaattaagtggggctaacactaatcggccagaactgcaaaaaatgctggcctatattcgtgagggtgatattgtaatggtcactgaattagatcgcttaggcagaaacaaccatgatttgactaagatcatgaactccattcaaaataagggtgccaccctagatgtgttaaatttgccgtccatgacagggattgctgaccccaatttacgtcaactgatgaccaacttgattattgaactctataagtatcaggccgaaagtgaacgtaagcgaatcattgagcgccagcagcaagggattgccttagctaagcagcagggtaaatatcatgggcgcaaaccccaatacacccaagacgatccccgcttgcaacatgcctttaaactttatcaaaatggtatgagcgatgtggatgtggctcgaaatactgggattaagcggacaacctttattcggtatcgaaagaaattcagtgtgtatagataaatttctcattaaataagcagggcagtgaagaaaaaattaaaataggagtgaaataacagatatatggaaataaaactaatagaggttagtgcattttggataagtaattaaaaagttccgatccagaaaaatacaaagataactattaaataaagtaatagcattcaccagtctttatggtagccttttttatccgcaaaaatatgaatacataatttttctaacgctctgtaaattcaaaaataactttaatcatcatgagtgccacctataatattcgatataacataggtcttttctcaaatcatctgtataatactacccgtaccacggatggaggaaattgatatgctaaggaaatatcccctagctttatatagcacttggtttatgattttactagttctgccgctaccgctcgttttattgctcaatctaaccttacttgaacccacacgcaccttgttaggttacgattttggcatcatcgcttacgtttggtggttgagtattgttttgctatcaacaaaaccgcaatggctggatcgacggatcgggttgcccgccatgcattttgtccacggcatgctcggtgttttagcatcggtcttaatctgctttcacgccatcatctcactttcgatggcgacagttgatctatgggtcaaaaacatcggcaatatcgcttggcatttgtcggtatttgaacttttatttgcagttttcttcctatcaggtgtttttaatcgctggccacttgtcgcccgtttaaaacaaaaactgcaagttgtctttaaacatcaagtatcggtttggattcaccgtttcaattttgttgcgattggtttgatttggtggcacgtccatttatttggtcgcatcacgaacctcacaagtttcttaatactgtttgatgcttataccgttgtcacaattggcttttatgtttggcaacatttcattgcggatcaatcagaacggttgacgacgtaacgcgtttcgcgcagaatactcaaaaaccgctaccatccaaaaaattatggatggtagcggtttttagttgttaccgtttcgatgtctctttttttctttttgcatatctaatatccggttggctacccggattggccagtaaccattgcgctaatccttcccctaaggcgtgggccattggtaaagctgcttggatttgctcatgggtaatctgattgacgtgcattccagagactaaaacagcattatttacaattaacggtttaatgacggctaatacttgatcaatcaacactttttcccgatgaatactgccaggtcggctaggtaaggccgtagttttggcttgacccgttttatcaaccgtcgttatcaccccataatggggcacatcgccaccgataatttgaatcaataaatcagtggtttgccgttctaatttagcatacatcgtatagccattctcagtaatcgctaatttaacggtttgtttcgtggttttgagcactttgacgggcatgggccaatccctcccaacgttcaccaagttgcgtgtcaatttgcaattgatccataattttcataaccgtgtgattgacaatatcatccactgtttggggatgattataaaatgcaggaatcgggggcacgattgccacgcccattttagctaatttcaacatattttcaagatggatttgattgaatggtgattctcgaggcacaatgattaattggcgtcgttctttcagagtaacatcggccgctcgtgcgattaaattctcgccaagacccgttgcaattgaagctaaagtcttcatactggccggaataatgaccatgccgtcatgcttaaaactaccactagcaatcgttgcgcccatattctgttcagcatgtacaaaatcagctaacgccagcacctgcttttcagtgtagccagtctgttcaatcgctaaattttctttagcccaccggctcatgactaagtgagtttcaacatcgggtatttgctttaaagcttctaataagcggatgccgtagattgttccactggcacctgaaattccaacgacaattcttcgcatgctagtcctcttttccattcattaatctaaatatttttgccaatccgtaatttctttgaattgtgcgcgtttgaaattcttgtgcatatcatatgggaatgtaccatctaaaacgagtttagaactcatccctctgactcgaatccgagccggatcatattctggtaattcagatgggtctaacggatgattgcgcatcccctctaagaccatgatgtcccggtcagcttggaaacgcgtattgatggtccacatcacatcgttccaatcaaagatgtcgacatcttcatcaactaaaatcactgtttttaattctttaaaagccgaaaaggcgagcaacgcagcttgtcgttgaatcccttcatccgcttcattatctttatggatttgcatgatggtcattaatttgccaccaccagcgggtgcattataaacatttaaaactttgcccggtatagcccgttcaactaagcttagaattgacgcttcggttggaatcccagccattgaaacgtgttcttcagaagggccaatagttgtttgaacaattgggttatcttgacgatgcgtaacagctttaattttaacgacgttaacagctggattagcagtcccgttataacctgggaattctggcatcgcataacctgagttggtattgatatcttcttgcatcgattgatttggtaaaatttcagcttcaatgatccattcagaccgcgcaatcccaagtgcatcaaccgcaacacccggaacaacttgaacggcttcatttcttaacgccccagcaacttgtaattcattatagccaagtggcgttgtaggtggctcaaaagtcgccccaatggtgattgcgggatctaacccaatattaatcgtaattggcattggcttgttaatggcttcatattccttcaaaaaagccccaatatgccgaccaccaggcatgatatacatcccaattgtatctttgctttccaaaaccatacgatgaattgtcacatcgctttgttgatggtcaacactatgaccatagacaacacccattgtaatatacggaccagcatcgacctcggtgttggtgggtgctgctaatagtttgcggatatcaaaaccagcatccgttgctaaatgaacaacttcttgcgctggtgcctgatctcgggtcacttcgacaggggaaactggatgcgttaccgcctcgtttagtagttgtccaagtgttttataatcgtgatgtaaaatagcccccacccgttgacgggatgcttgtagtccgattaacacccgactacccgggaaacctttgatgttattaaacatcatcgctggtccttcagcggttggtcgcatgaccgtcccgccagcaccaatataccggtagacaccggctaaatcggcatctggattaatttcaacatcagtttcatgatattgaccgggtaatgcttgtatttcagctaaaacttttcttaaatcatagggttgttcagtcatcaataaacctccttagtctattcaatacattcattatcaatcaaaccaagatggcgaacaattcaaactaaaagcgtatctattcgataacggaatagatacgcttctttaagtttgttgaataaattgccagaataaatcgacagtcgctgattggtgcccctggcgtttgacaaacgctaaccgactgtactgcttaggctcaattggaacggccacgacattcggatactccgttaaatcaaaggcgtgattcatcatcaccgaaacacccattttctgattcaacatttccaaaattaaatcaactcgacggccttgataaataatattgggttcaatttccgcctgtttcaacgtactcaccactggatcaaaaaaatgcgtggcaccatctaataataaaaaggcttcattagctaaatcattaatctgtaacgactgaaactgtgccaagggattatccttggccattaaagctacaaagtaatcctcttcttcccccaacacatcgtacagcccctgcttaacggtaaactgatcgaataaacgcgtaaagacaatgtcggcttgcccatcatctaagatggtcatcaattgacttgtttctgcctcactaaactttaaattaatatcgggatattgcttcgtaaattcaaaaattaattgaaatgcttgatagtgcgagatagttggaatccccttgatcaccaaagtccggtcagcttgatgaacttgttgatcaatcgtctgtaaaagtgtttgttcattttgtaaaagcgctttaaccaatggcaaaatagtcgtgccagcctgtgttaatgaaacagtccggtggacacgcgcaaataaggtcactccccattctttttctaacgccataatctgtttagaaaccgtcgcttgcgttgcaaaaatattttcagcggtctgactataattacacgtctgtgctaaatcgacaaacgttgctaacttacgtgtatccatctggatacctccaacttattcatatttggaatattttagcacataatttgaattgttcggtctttttttaacccgtaaactagtcaccagtgagtttattatcaaattaatgtaggaggttgttatgccaattggaattataattaatgcattatccgttttattagggggaatttttggggcgctaggtggtcaaaaaatgtccgccaactttaaagatggcctaaacatggctttcggaatttgttcaatgaccatgggtgtttacgccattgcaccaatgaaaaatatggcggctgtcattttcgccattatcattggaactggtttcgggttgatgattcacttaggtgattggatcaatcggggcgccgctcaaatgcaaaaattcatctcccgtttcatcagttcgccaaccgggttagatcgaaaagacttcgatgccacactcgtgaccgtgattgtcttattctgtgcaagtggtactggtatttatggggctttaactgaaggaatgaatggcgatgccacgattctaatttcgaaatcgattcttgatttctttaccgccgctatttttgccgctaaccttggttttgtggtttccttaatcgcagttccccaattcgtgatttttatcgtgttgttcctggctgcccatctaatctatccattaaccactccaaccatgatttttgatttcaaagctgccggtggggttttaatgttagccactggttttagaatggttcaacttaaaatgttcccgaccgccgatatgattccggcaatgattgccgtcatgccgctttcttggctctggaccaccgtgattttaccactactctcatagtccaaataaaaaatacgataagcatatcgtattttttatttacctaaagttgattggccgtaattaaacgatgattgccagcattgatggttaaactaatttgccgctgataatcgtcaacgtaataatttttaccggttaacacaattgaatccgcattgttaatgactgcttgaacgagcttttcgatttctaattcgctaaattgcgtcgctaatttcttattcactcgttgatagactaacgatgtatagcagacggtcgctaataaatcattttttattgataaccgtgtttgatcgatattatcccccatcttttcgcctttcatcactattttcaatataatgataccaaaaaatccgcctaattcaaaagaattaagcggattttctctatctttgattaagctaattcccgttgtgctttttgagcggcaacgttcatgctattccaaggacggtcaaaaccgggttggaagaagaaatcagcgtaagctaaatcgtcaatcgtcatttgaccttgaatcgctaatgaaatcgcattgatattggctgtcacgttggctttcgacatgatttgcgcccctaatatccgccggttagtaggatcaaaagttaatttgaaataaaccggtgcattgtctgcttcaggcacaaaatgaggccggtataaatcttcgacaaaaacggattgggtcttaacccctagcttgtccgcagtgccttctttaatcccggttgaagcaaagtgataatcaaacacacttaacgctgatgaacctgaaacagctggtacgggttggtttgcattgattaagttcttagcagcaaagcgcccttgccgtcgtgcatttgtcgctagcgcaattggcatggttgtttcagttggtgcatatttcacaaccgttgcatccccaaccgcaaagatatcaggttgactggtttgcaagtattcgttgatttgaatccgaccgctatggtctaaatcaagcacgccttttaaccaagctgtgttggggcgaatcccagcagcttcaatcaccaaatcagctgggtattcagcttggtcggtaaccactttggtcactcgaccatcaaccccttcgtaagctttcacgccttggccagttgccgcgtaaatattgtgctgttgcatttctgcggttaattgatcagtaaattcttgatcaaggtataaactcaataatcttggtaagacatcgataatcgtcacttttttaccagctttggcaaaaacttcagctgcttcaataccaatataacctgaaccgatgacaaccacgttttgaatcgttggatcaaccgtcttggctttcaatgtgattgcccaatcacgaccgcgcattgaatcaacattcgctaaatcgtggcccggtactggtaattcaaacggtaccgccccaacacttagaattaatttatcgtaactttcttgacgttttgtatcctgttttaaatcgtgcacgtcaacggtatgttgacccggattaatttgagtaatggcttgttgggtgaagacgtgaacgcctttagcccgcatgccttcaggtgttgcataacgaacactattaacatctttgacctgaccctctaaatagagctgcatcccacaagatagaaaagataaaaaatcgcccttttcataccattgaattgtagcatctggataatctagtaaactttcttgaacagcttcgaacccaccgtgcgatgaaccgacaacaataattttcacgttgatcactccttatctattttgtacaacctaattataacgcagataataattattacaatatagattttttgcaacaattaacccggttcatgaggattgaaccgggtcagtttaaactattttcgttgtttcgtatgataataaaccggaataccaagtaacgtcacgacaatcccgatggctgccaagaaggtttgcgtaaataacgtattgattaagataaagctcccgccgattaacgcaatcaatggaatcaccggatatagtggcactttataaggtcggtacaaatcaggttcacgttttctgaggataatgacacccgcaaacgccatgcagtagaaggtccaaatcacgaaaatcaacatgttggtaatcgtatcgaaggcgcctaacatcatcataattgaagccactacgacttcaatcacaccgcttgcccaaggtgccccttccttggttaacttcatgaagaaattattgaaaggtaattcttttttgacggccatggcgtatggaatccgcatgccggtcatgatgtaaccattaacggcaccgtaacacgaaattagaatcccgattgtgaccaacttgccaccaatcgcaccgaataaaatcgttgaaacgtctgaagcggcatttaaattgccgctgatttgattaatgggtaacgtcattaaaaagatggcattaatcaataaataaacaatcatgactaacccaattcccagtgaaatcgcaccgggcaaatcacgtttcggattcttaagttcgccggcaatattaccgacgtgaatccaaccatcataggcgaataatgtcgccaataaaccgttgcctaaggcggttaaaaagttatgatgtggtcctgcaacgactgggaataatgagaaatcgactgatccttgttgcattaatccgaaaagaacaatcaccgcaatcggaattaatttgaccactaacgtgactgattgtaataagccaccagccttagcgcctaaacaattaattaataaaattgaaactgcagccagaatcgcaatcgccacaatataactctgttggagatggaataaattaaccagttgggttgcaaaaatcaccgagattgctgcaatattggctggaaaatagatgaaagcttgtgcccaaccggcaagaaaaccccagaaatccccatagatatgttcaatgtacttcgttaaaccacccgtttcgggaatcgctgcagctagttcagcaccggtcaaaccggcgcaaattgtaatgaccccacctaagaaccacgcgagcatggccaagctagtcgaacctgtttcagctgaaacactagacgctttgaagaaaacacccgcgccaatcacggttcccataactacggataacgccgggaaaaagccgacatttctttttagttcagtttcgttttgcataccggtacacctcaattcattaattttaccaataaaaaacgcgttacattcaacaattgaatataacacgcctttcaaccgattcctaatttgaaactaaccaacgacccctttgctcgtatcagcaggtttgaagaggtgatcaataattccagaaacacgcgttaaatcaacattaccaccggagacaagtgcgacgatattcttaccttcaagccatttaggatcgaccttaccactgattaaagcggcagttggcaaagcgccggctccttctgtgacaatcttagcccgttgcatcaagtccgtcatcgccattgcaatttcatcttcggtcacaagaacaaattcgtcgactaaattttgaacaactgggaatgttaaattcccaggaatcgcaacatcggtcccatcagctaacgtaaagtcatcatgatgactcgtaatttcgcccaattcataagaagcatccatgccgtgcacattttcagattgaaccccaatgatgtgaattgatgggttgaatgatttcaaagcagttgccacgccagagattaaaccaccaccaccaacgggtacgatgactgtgtcaacattccaaatcttatctaaaatttccaaaccaatcgtcccttgacccgccatcacttcgcggtcatcgtaaggatgtacaatcgttaagcccttttcttcggctaattgttccatgtagagccgtgcatcattgaaagtttcaccgtgtaaaacaacattagcgccgtaaccagccgttgcttgttgtttagccaatggtgcttcttcaggcatgacaacggtcgcatcaatccctagaatcttagccgttaatgcgacgccttgtgcgtgattgccagctgaagccgtcacaatcccgcgttcgcgctgttcagccgttaaatgattaattttattattggcccctctgaatttaaaagaacccgttagttgcatattttccatttttaagaaaacattgcctttagtcacattccgacttaaaaacattgattgaattaatggtgtttcgcgagcataaggtttaataattgcacgagcctcttcaatatcttgaatattacaaatatctgctgtctttgaaactaagtcattagttgccattccaatccgcctcttcctaattaaaatcgtttgggtgttactttgttatttttagagtatgagtgacgatcgccattctcttcgttttaaccaatcactaatcgcaactttcatcacttaatgcctccttgtatttaacttcacaataactgtaatcctatttggacggcttgtcaaaattaataagttttttattatagcgctttcatttaaccgttaataatctctcatatgaatttcacttgttcctttattcaccaaaaaacggcaatcattattactcgattgccgttttaaatttgttattttattgttattgtttaaagtacatcgacgcgctaagcaatcagtacagaattggcctcattaatacgtctctattaactgttgtctaccttgataaatccctaaaatttattcaaaataccagccaatccgattaaaataatcataatcccaaatgcaacactggaccataatccgtacaacataaatggtggcgtttctcggttcccccgttccttaagatgctgaaaagcctgtttagaaaaatatagttcgataatgccaatcaagataccgatactcccaaatattctaaaccacatgccaaacatcccctttgttacagtataaacttaccaactgattagttacaactaatcgcagttgattttaaaagaatagccttccttagtccaattaacctcgccaaagttgccaagcgattggcaacagtcttaaaactaagaccattccggccacgagttgaccgagttgggctctttttagtagttgcttgaaaaattctgcgattaaccacgcggaaaaacaagcgcctaacaagcctgccacaaccaacatgattttgttatcgaccgccactccaaagaccgtcaataatagttgaaccagcccgaccacaacaccattgatactcgtcgtcagataaaagctgcgtttgaccaatactttatcgaccggttcttgtttcaaaatcttgcgggcaatccagtacaataaatatccaaagtacgttgcgacgaataatccaatcacgattccgactgaaccactccaaaaagtcacccagcgaaccattgccggtgccgttttaatgactgccggtaccatgataaacgcgccaaagactaggccaactagtgataccactaaatataaactaacccaaattttagtatcttgagctgtaacttgactaaaccattttttcattttcataacccctctacttaacgaataatttcaattaaatccttgcgacttgctgcgttggctggcatgaccccaaagactaagccaacaactgtcgacacgccaaaggctaaggcgaatccgccaaaactaaagctggcgtgaaacggcataatcggtaatgcgctgatggccaatgccaataaaacccctagcccataaccgacgaagcccccaaaaatcgtgagcgtcgcgctttccaataaaaattgacgacgaatatcctgctgtcgagcgcccattgcgcgccgaatcccaatttcggtggttcgttcggcgacagaaatgtacatcatattcatgaccccaattccggcgataaagagtgaaatccccgcaaccgctgatacaaaatacgtaatcgcatttaaaactttaccaaatgtatcggcttgcgccgttggatcattactttgatagtcgccttgctggtgcatactcccttgggtttttagaatgtgtagcacttgttcgttaaccttgctcgctttactccctttagcaagcgacaacgtcaacaaatcccccgtccgctgactttgggtgtacgattgatgcaccttacgcggaatcgtgatattcgcaggaatctcaccactcatcgcagctgaaaaattaacactatcattgaccgccttagaaatccccacgatttcatacagttggccatcgacttcaaccccgtggtgtaacgcgttagcctggctaccatacagactgctcgccaaatcggcgtcaatcaccgccacttggttaccaatctgattatcagccgtgcgtaaacgccgaccgactaataccgaactacttttaccggctgtatagtggaccaaaacactttttgttttatttttaaccgctaagctaatttgggcgtaatcgtcatctgaactcgtctgtttgacttttgccacccctgatacttggccaacgagcattaaatcccgttcgttaaacggctgactactcgtattggccacatcattagcactatacataatctgagtctctactttaccggctttattattcgtaatacttttggtgacccaattcgaaaaaccatccccgattgcgagaattgcgacgaccgatgcaatcccaatcacaatccctaacatcgttaaaatactccgccgtttattcttcagaatcgaacgcagggccgtccgccaaacttcactgaatcgcatgtgatccctccttgaccggttcatccgcaataattgcgccatccagaattttaattaagcgatccccatataatgaaacttgtggatcatgggtgactaagacaatcgttgtcccttcgcgttgattcaaatcacggaaaatctgcataatctccgccgatgttttggtgtctaacgcaccagtcggttcgtcggcgatgatgaattttggttgatgcaccaaagccctagcaatcgccacccgttgttgttgaccacccgaaagttcactgggtaatttatgactactgtcagctaagcccactcgaaccagcgcttgctcaacgattggccgggccgcgcgtttactcaagccaccatatagcagcggtaattcgacattttctaatatcgtattgttggcaattaatttaaagttctgaaaaacaaaaccgacactccgattccgaattcgggctaatacattatcattagcctgttgataagattccccattgaagtaatactcgccggtatattgccggtcaatcaaaccaatcagattaatcaacgacgtcttacctgcgccagacgggcccataatggagagaaactcaccctgatcgatttttaaattgatatcttgtaaaacatgaaattgttgatcgccattttggtaatacttattgaccgcttttaactcaatcaacatcggtttgcacctcttgaccctctttcaaatgctgacttggattagcaataatccgcgatttgagcgtcacgccagatagtagacgccaatagccatcttccttttgaacttcaactttttgacgatgaaccttatgttgattgacgacatagacatagcggtcttggccatccttaacaagactcttagccggtagacgcaccgtttcttgtggaattcggatttgaacgttaaagccgttcgttaattcagtcgtcatctgtacggtgaaccgataagtagcgacttcactaccgccaccttgcccaccggtggtcggtgtcgctgtttgcggcgttttatcaatcgtcataatcttacccgcaaagcggtcggcattactaaccggcatgaccgtgacggccatatccggttttaatttaagataatcgtattccgtgacttgaccgtcaatcacttggccatcactaataatttgcatgcttggcacaccactattattattgctggcagtatcaatattgatggtccccgcaattttagccgtcacctctggatttaacttaccattcagctgattaaggctatcggtactttgttggagcgtcaattgatcggcagccaacgtattttgcacttgttgtagttgatcagcggccgcgccatctgaactagcggcactacccgtttcaccatcagccggtgtggcaacgggttgcgccgccgcttttttaagcgttgcaatcgccttttgatcattttgaatcgctaatttagtttttgcaatcgtttgattggcttcggtcaattgactttgcacttgatcatcgtgaaaagtcatcaaaaccgttcccgcctcaacgtgttccccatttttgacatttatagcgcttaacgtaccggtactactgacccccgtttcgaccgtaatggtttctttagcagcgaccttgcctttcaataataaagcactgtcgcgcttcacttgataggttgtatattgtttcttagccgtcgccgtttgtttcttggctcgattgagtccgacaccaacaatgaccaccaaaacaacgagtattcccagaattaaccaactacgtttacgactcaataactttttcattcgtgacttaattcctcctttagcaaatagcctttgcccctagctcgaataaagacccctctattatttcacgaataacgcctttaacgttgattgcattattatcgtcacgtttggcccgattaacgttcaatttaaaaaggaatcaacctgaattgatggctgattcctttatcgaaaactcaatgttgttttaaaaaagtgattaatttgcgcgtctctttggtcgctaattcaagcgcatcaagttgataaatccgttgtttgtcaaaatcgccggcgtaaaactggcgttgtaacccattttttagaattaaaacttgcggatttaacgtttcaattacttggatatccccttctgcctcgtctaaacgaatctcccaatctaaatcaagtgctttgatttcacgatttagctgttgtacgaaagcccgctctttgtggttaaacacccccgcgttaccaattaataagggtagactctgataaaccaatatccctaatttagtcattttgcgattctcccatccattactttttaagccgtttatccggcttcaacaaaccagcgaaaaaagccagtacaatcgcgagttcggtcacaattaattcaatcggtgaccaatgatagacaaccgtcaagacgagtccgatgaaaatcgcaatcattaaaactgcatctttcgtccctatttttaaataaaacattcgaacacttccttttaagttaattatgcaccgccaactaaaaaagcgctgaaaaaaagattaacgttcaattttacccgttaaacgttaaccttttgattgatattgttttaatctaagcaccaattcccgcgactttcgaaacgatactttcgtctgactaccgtcaacaaattctaattgacgagacttactatcgtaatccgcaacgttcgttaaattgaccaagtagctcttatcacagcgaaagaacatagggtagcgttctgctaacgcgtttaaatttcccaggaaatcgacctgccgattagtagccaataaattaacgtggcccggattatccttcgtcgtatacaaacagataatttcggctaacggtaacgagaaaaagcgcggcccaattttataactaaataaatctttttcatgatacgccgccgcttcattttgcttttcggccaataaaatatcatcaatcatctgttgcttaatctgcgataacgcttgatccttcaaaatataatcgagtggcgcaatcttccgctccaacgttaagaacgctaattcttcgtgggttgtgacaaaaacaatctgcgcaaatggtattctttgacgaatcgtcagcgctaattctaaccccgcttgacaattggccccaatttccatgtctaaaaagaacaaccctttttgctgattttcaaccgtccgcaataatgccgcagggttcgccgtcgcacagaccaaggtcattgcgtattcattaatcataatcgtattctcaataatctgttgataagtcgcttgttgttgttcgttatcttctaataagtaaactggaaacacgttaattttcctccgtaaccattaaagtttgccgcaatcgttgggctttaatttgcgtttcaaaaaaaagattggcctgtttggcgactaactctttaacgttggccaagccagtcccgtgattggtcccttttgtcgtatagccgagttgaaaaagttgttgcacatcagcaacctgagtcgcctgattttcgattgtgatttcaaccaaaccggtcgattgaatcaacgcacaattaacattttgatccggttcctgagttgcttgttcaatcgcgttatccaataaaatgccaataatccggatgaccgttaataaattggtcgctggtaacgtgactggtgccgtcatttcaaagttgagtgtcactcccacttgtttggccgctaaaaacttctggataatcaaaccacgaatcggttcattttttaaataatcaagttgcgcgataatggccccttgcaactcagttctcatcggctgttgcgctaataattcttggtaataggccttaaattgttgttgatttccctgttgggcaaagctctctaacgataacaacatattccgataatcatgcttgaaacgtcgcaactcagtatattgttgttcaatattaacgagataatcctgtaattgttgattacgttcaaattgatcggcggcctcttgctgaagcgcgtaagctttcaaaaagatcaccacttgccaacaagtcaccccaatcagaattccaaaaatgacgataatcgctaattgaatagtcgccgtgacttcctgtaaattgccgattgttaaaatactttcaagtgctaaaaataaaccaaacgagaaccaaaaaaattggcgttctaatgcaaaattcgtaattttttgattaatttgatctacttcagtgcgtttaatcttgagtaaccaccaaaatattaaatcaaataaaaccgcaatcgcagtcccaatcaacgcaatttcattggcttggtacgccaaaatagtcgcactataattagattcaacaactgacatgcagaattgaccgaaagctatcgccaccgaaaatagcattaattgtaccgaagtaaccaccataaacgtcgctgtatccgtatttttaatttgatagcttttttgacgccagaagtgccagactagtcggcccaatactaagattaacagcgccgcgtcagcgaatagtaaatacaatcccgcaaatagtaatgcaatcaataaatccttgatgcttcttttaaaattaatttgtttttgaatatagcggtgtaataaaaagatgccttcaataactgcaaaatcttgtagataagcgacccaagtatccgtcaaaatcatggttttcaccgactcactctaacaattgttagttattttaataatcagcgttgtgcttactcactagtctaatcaaaatataactaattcacaatcttaatttgtaaattaaaacagattattgtataaaccattgccccctccaaatcaaaaatggcctttatccaaaaattctgggcaatggccatttcaatttagtctttaaagtgtgattatcattcttgattattatttaatataagccgtcttataactccactgcgcaccggctgtgttgtgcacgatgcctttaacattcgttttctttaggtaagctgtatcgttttgatacaacggcgtgatgccttgggttttactcaggacttggctggccgtgactaaatcggaccagcgttgactcggattgttggcatccgtggtcatcgctttagccatcgctgctgagtactcggcattttcgaaaccacccgtattgctggcactgccgggtaacatcacttctaaaaacgatgttggatctttaaaatcggcgccccaacccgctaataacagatcataatcgcccttcttgtcacgactgctagcgacttggcttggaacagtctttaaagttaatttgaaaccaggtaacgctttttcaagttggcctttcaaatattgacccacgtaagaaccgttggcatcatcagaattgagggtcaacgtcaacgaaacctggtcagtattcaacgtttttaacgctttttgccagtattcagtcgcctttttaggttcgtaatcgacggtatccgcgactgcttgtgatttggcaaaatcaacttgcttaactggtgagttggctaaaccagtcgggacaaagccggtaatcggattcgttttggaaccgaacaatcggttgtttaacgtcttacgattaatcgctaaggaaatggctaaccggacatcttgattgttcaaaatttgcttggtttttgcgtccgtactcttaaaattatatttcaaataattcgttaacgcatacggataccgatggaagccggcatcatctcgataattatcaatttgttgattgtcgagttgcgttaaatctaatttaccttcttggtagagatacaatgccgtgctcgtattttctaagacggtatagttaattttttgtaatttaacctttttgtgatcccaatattctggattctttttaaattgccatttatcgttggtccccgtccaattgactaatttaaacggaccggaataaaccatatattgcgctttggtggcatactttttaccgtatttttcgacgattttttggtcctgcggtgcaaataacggataagccatcaacgttttcatgtaggcaactggggtcgtcaagttgacttgtaacgtttggtcatctaacgccttaacccctaattcagttggtgccattttaccatcagcaatcgcgggtgcattaacgatactgctaaagaggttggtatacggtgatttagtggccggcgtcaccgtacgttgccatgaatagacgaaatcctgtgcgtgaatcggatcgccattactaaacttggccgttcttaatttaaaggtccacgtcagaccatcagccgaaacctggctacttttcgccaaacccggttcaatttcaccgttagtccccaaccgatacagactttcgtagatattcccagtttgtccgtaacctgtcgaggttgaaatatcgattgtatcgagtggtgcggtcgcccccaaattcaagacctgtttggcttgaacggtcgagatatgtaaaaataccattgcggctaaaatcactaatccacttaaccccaattttaaccgcgcattatgcttaatcatctaatcactccttataatttgtaagtgaattatataaaaaatattataaaaagtaaactaaaacgctcaacataataaattggggcgtggctgtgagctagcttcttccgtctagctacaaaattgcccatataattaaagttcaaatcatatgggcaattattaggttatgctcagttgctgaccgcaactcaacgcactcatttttttaacgtgcttctcaagtagccttttccggttaactacaaaatcagcgtcatgattcaaaatacaaatcataacgctgatttttaggttaatcctcaaagcctgaccaacttgagtgagcacttcgacttaatttaaccagccatgatggcgggcgatttggattgcttcaatccggttcgtcgcgtctaatttgctgagaatcgtcgagacataattacggacggtgccgtcactcagaaatagtttttgggcaaccgctttggagctgagcccggctgcaattgccgttaagactgccaattcgcgttcggataacggattttgaacttgttgcgttaaccccaccaccaattcgggcgcgtaaatggtttggccaatcatcacgttatgaatcgcttgaatgagcgcatcactcggcccgtcttttaacagataagccgcgacttccgcgccaatcgcccgtttaaaatacgccggttgggcaaacgtcgttaagatgatgactttcaggggtaattgagctgcctgaattttttccgccacgtctaaccccgttaactgtggcatctcaatgtcgagtaagacaacatcgggttggcaaacttgaatttccgcccaagccgtttgaccgtccgtcgctgtcccacaaactgtcagatcatcttccaaatccagaatccccgctaaagcggtattcaacaattgttggtcttctgctaaataaaccttaatcatgcttgtactccttctgccggaatttcaatggtcaaacaagtcccactccgattgctcgttatcatcagttccccgtttaaagtcgctaaccgttcccgcatccccggaatcccgttacttttaacctgatcgctatcccgcaatccacggccattatcactgattttcatctgaaagcgggtcgccagctgttcaaactgaatgtcacattcactagcccgactatagcgaatcatattcgtaaccgcttcgtgaatacattgcgccaatacctgttgattagtttgggataacgacttcgataagacttcgttcttcgtaaataataacatccccgccacacgcaagttttgttcctgttggatcagttcttcagcaattgtgacttggcgtaaatctgtcacaatatcgcggaccatctgtaaattatgccgggaagcctgttcaatttccaataactgttcaggtactttctccggtgccttggtcaacaaccggcgggcatattcagcctttaaagtaatcatcgaaaaggattgacccaaattatcgtgtaaatcacgagcaattcgttgccgttcattttgtttaatcatcgttgtcaatcgttcattcgtttgcattaattggcgatttttacggttaaaatcttgaattgaatgggccgcaaaaggcgatagtgcgcagaatagtccgtaaacaataatcccgacccattcaaagccacccatctgttgaccgtaatagaaataaaaataaacagttgggattatgattgagcccatgtaagccccgtaaaaccagcggaattgccggcggtgcatcggaatcgatccgaagacccacgccacatagatgttcaaatacaacgcttgaatcatcatcgctaaaatcatactcgtgatgatttggacccaaatccaaccaaatcgccatttagtggaagcgtaactattgcgataggccaccacaaaaatcaggatgattagcatcatcatttgttgttttagtgttcgatacggataggcgtagctgattggaaagaataaaaacagtaaccagacatacggaaaataaccgaatcgctctggtagtgcgatatattttttaaaaaaattcatcaagcccggactcctcgtttatggtagcttaagtatactacaaggccgcctaaaacgagcgtccaaatcatggtgacgccataactgccccacgcaacgctctgaccggtacccaaggcttggccaatttgattgattggatagaccggcaagtgtttgccaacccattgcacattcttcggtaacatcgaaatcggccaccacagcccactaagaatcgctaacggaaagctgattagattagccgctaattgaattaaattgctatcgttcaaaaacgaaatactgaggccgattaaacacaacggcgcactcgccaaccacagccaacccgcagtctgtaaccaaaccgtccaatcaaggacgatctgattgctaaaggcggccgttataaaaatcaccagcaccgataagccattaatcagcatgatattgattaatttagcgccataatagtaaccgcgactggcgggcgacaggtcaatcaaatcgagcacgccctctttttgatcgtccgctaatagcgtggataacgtaaagacgttactaagaattaaactataagtggtcatgctcaacatatattgcaccgcaaaactagccggcatttcgccagtcatcatcactttggtgaagagtagatagaaaacaatcggcatcaataatgaaaagataaaaaagcgtggatttcttaaataagcgcgtttaaaatcgagtttactttgaaccattaataattgcatcagtatctgcccccatgatttcattatagatatcggtcaacgaaccagcttgaacctgcacttgatgaatcgtttggccaatctgtggactcaaccgtgccaaaacgacatcactatttgtcacttgtaaactaattcggtgtgcgtgttcttgataggccagcacttctggccagtcttgcaagttggccatcgattgatcggctttgaattgtatctgactactgcggtattgttgttgcaacgtttgaaaatcaccgtcgtattggaattgaccgtctttcaaaattaaaattcgggtggccactttttcaatttcctctaaataatgggaagttaaaataatcgtcttgccggcttgtttcaattgatcgatttgttgccagaaatgttggcgactcgtcacgtccatcccgaccgtgggttcatcgagaaaaattaaatctggatcaccagccatcgctaaagcaaacgtcatccgccgcaactgaccgcccgatagttggttaaccatttgattggcctgctcggttaaatccgccatcttcaataaagttgctactggtaatggttgttgataatactgaccgaccatcgttaattcttcactgacttttaaccgtgcaatccgactatcgtcttgcaacatcgccccaatccgattaaaatggcgtttttcactgggggctgcttgtaaaacggaaatctgaccacttgtcggttgcagccgtcctaatattaaattaatcagtgtcgttttacccgcaccatttgcgccaaccaatccgataatctcaccgggttgcacttttagtgacaccttttttaaaaccactttagatccaaattgcatcgttacctgttgcatctcaatcatcatgatcacctcgtttgaataagtttagtatacgaggaatctcggttcgttggcagtcgtttttgtcatgatttgcgggtgacaaatgtcatctttgcgaccaatcacacggttgccaagccccaatttaaccacaaaaaaatgattatccgaatatttcgcggataatcattttttaatcgaacattaattaatcaaatttgataccttcaagcgctttaaccagtaatgttaaatctgatttcttcaataaactaaactgaccggattctaattgattaaactcttcaattaataaataggccgataagtaccgttttaaaccatctttactagctcgcacatcatctgctgcgtttaaatttgaaccgctgacgactgccagtgcgaattcagttggatcgatcttaatttttttgtctgccatcataatccctcatttctaaaaattaattgccgttggaccactcccttaaatatagtccatctcccctcgttaacaatcattaatattaggtaaataaataacaaatatacaggtgatttgtcccattttttaacctatccgattgccgatagtggtttctattgaaaccgattacaataagtgccataataaccttgtgaaataaatctttaaaattaggaaggttacgaatatgaaaattaaagcagcagttgttgaaacccaaggtgccccatttgtgattaaagataacattgaattagcgcctcttcatcccgatgatgtccaagtccacatggtcgctagtgggatttgccattctgatgaagcccttcgcaaaggcgatgcggtgattgcttatccaatcgtcttaggtcacgaaggttctgggattattgaaaaagtcggttcaaacgttcaaaatttaaaagtcggcgatcacgtcgtcctctcattctacgcttgcggcatttgcgacaattgtttgaaagggatccctacccaatgtttgaactacgctgataataatttatccggcgttcgtcccgatggcagtgcccactttactgaagaaggtcatcaagtcgctgatatgttcgaccaatcttccttcacaaccacgacagttgtacgtgaacgcaacgccgttaaagtcgacgatgatttagacttacgccaactcggacctttaggctgcggttacgtgactggtagtgggactgtcctcaatactttgaaaccaaaacctggtgacacgattgccgtcttcggaactggtgcagttggtttagcagcgatgatggctggtaagatttccggctgtaccaaagtcatcgccgtcgatatcattgacgatcgcttaaccttagccaaagaattaggcgcaactgatgtcattaacagtcgcaatacggatgctgttgaagcgattcgcgccttaacgaacggtcggggcgttaacttctgcgtggataccactgggattacgagtgtcatggaagcctcaattcaagcgctttgccaaggtgggacttccgcaaccatcgcagtcacacctaaccacattgatttagacacttggaacgacttatgtgtcaacgataaaaaagtcgttggcgtgaacatgggcgattcaattcctcaaatcgacgtgcctcgtctaatcgaattctaccgtcaaggtcaattcgcctttgataagactgaaaaattctacgcctttgaagacattaaccaagccaatcaagattcaagagatggtaaaacgattaaacccgtcttaatcatcgatccagactacacggtttaagctttaacgcaaaaacaagctgtgacagaactcagttatcaattgagtatcaagttgaaaaatcgcctatcccgaactaaggatagacgattttttgatttgaacggaaattgatgagttctggcgcgcgtcggagaggaacgttcgcttaatatcagaataccacgacttatgtcacagcccattttttgatggagatgtgctcgttctcacagcttcctgtgcttagctacgtttcgcaaacaaagtccatagcccggactttattcacggaactaggctaatgctcagaagctacccgtgagaactcgcactctgtctaataccattccggtttgtcgccttctgtattgggtttgttgacgcctagcgaatcgcggttggcttccgttgggttttgaatcaggtgagtcactaaggcggcaatactcttgcgtgacacttcggttcctttaaattgatcgtgacgatgcgtgatttcgtaatcaatttcatcatggttgtctaaccaagctgggcgaataatcgtgtagtctaaatcagattcttcgatgactttagccgcggcagcataggttggcaaatagccgttatccaacatttgatgattccattgaccataacggcctggtacttcgtcataaataccgagtgtcgagatccaaatcaaccgtttaaccccagctgattgcatcgcggtcaccacactctgggcctgttgttcaatgttgctcccagccaaattggcgtagacgacttcgacaccggtcatcgcggctaccaaagcagcttgattagtcgtgttgccttcaatgatttgttcacgctggacatcgcgaattgaaagacgattagccttgcgtaaaaatagcttcaattggctatcggtctgtgtcaataattgttcgcgtgcgagttgcgcaatctgaccgtgtgcccctaaaattaatacagttgtcataattaagtcccctttgattaatgaataactaaagtgtaaacgtcttacttttaataagcaaacaaagacactcgttgtccataaaacattttttgacccttaattcttagcagattttcaatagtttgttcatatttaattcataacttgttgttattctttagacatcagataaattcccccaagaaatcatctgagcgattaagtcgagtccttccctagagaacttgactagtaccaccaatgagttatcgtccaacaggtaggacagacctccctcatttgaaattcctcccaagaaaattcaatgctggtcgatgcgggttcaacccccgctaactcgatttgctgctacccccagcaagcatctactcttttttcaaacacacactcgacccgctgaaaagcgggccttttttgtgcaaattaaaaaccagctaagtgataatcccttagctggtttattttacttttataatagttggccaattctcgttttaaattcatttaagaagcgtggcgtatcgacttgaacacacacttgggtccgcgtcgtcaaatcttccaagcgaagattatcaccaatcgttcgaccacgagaaggtccggttgtctcagtcgttaagtttagggggaaagtcgtgacgagactgggatcaatggccaccgcgaccgctaatggatcgtggagcgcgcaaccctggaggtggggagacgtgacttcataagccttgatgtaataatcgaccatatccgcatatttaatcgcggcttcagtcccaatcgcccgccattcagccgtatcggctttcgtgaataacgtccgtaaagtaacatccaggccgaccatcgtgacgggaagcccactcttgaataataaatcagcggcttctggatcttgattaatattggcttcggcaaatggtgacacgttgccggccaccgttaatgcgccacccataatcacgatttgaccaactttttgtaacgttggtaaatctttttgaatcgctaacgccaagttggtcattggaccggtcgcgacaatcgttaaatcagaaccgtattgttgacaagctgttaataagaaatcaacggctgattcagtttcaccggtgggaactgcttgttggagatgaatatcgccaaccccatcttggccgtgaatctcggcgctaatcggtaaaactgaaaaatcgctttgattcaatgcgtggccggcaccttggtaaaccgggactgctggatgctgtaataaattcaatatttgttgactattgaccacacttctttcagttaacacgttaccgtattcggaagtgatgccgattaattcaatttcgggtgaaccaagtgcgtacgcaatggcgagcgcatcgtcaatccccgtatctaaatctaaaatcatcttatgttgcattccaaaagcctcccttagttcaaacgattcgtaataccctttcagtttaccgcataaaagccctttcgtaaattttaatcaaagcactaatccttaatttttactgatattgattaagaagtcctttatttaatttacgaatagccgctaaatggttattttctggtatattgaaacttgcttattaattcaactaaggagtttctcaatgaccattaaacaacaccattacgtcctattagtcccaattatcgcttgcctattactgaccggctgcttcaaaaaaacggccacaccaactaagcgcacctgggaaaccccgacggaagaaacgcaacgtcaagaccgctttattcaaaaaatagggacgtctgccaaaaccgtttatcaaacgcaacaacaagttttgcccagtatcgtgattgcgcaagcgatcattgaatcggattggggtcgtagtgatttagcagtgaaagcccacaacctattcggggtcaaaggcgattaccaaggtcaaaaaattctaatgacgaccgatgaatatgaaaatgaagaacgcgtgacgattaaagactattttaaaagctacccaagtctacaaattgccatcgaagatcacagccaatttctcagcgtcggcagttactcaacactcaaacaacaaaccgattatcaaactcaggcgcaaaccctccaacaagcgggttacgcgactgatcctgattatgcggctaaattagttcgcacgattcagatctataaattggcgaagtacgatagctaataacaaaaaaagctgtgacagaactcggttatcaattgagtatcaattgatgagttctggcgcgcgtcaatgcaaaatatgcatttaatatcagaatactataacttatatcacactcttttttatttaaataccgtgtatttcattttccataacgattgtttgaccagcaggcaacgttgaatcattcaagcgcgctaacaaaatctccgcacacttaaccccaatttctttagttggcggttgaatggccaaaattgaagaggtaacttcatcaatttgatcagcgtagtcataatgactataaaaaagatcctgaccaatccgcacccccgcgacgtttaaatattctagtgcccccaccgacatattataattactgacaaacaaggcagtcaccccttgcgccaacaactgttgagcgccttgataaccacttaatcgtgaataatcaccttcataagtcaccaatgaaacatcggaggctagcgccacagcttccgttgccccggcgagtcgttcacgcgccccataatcggtctgacgcgccgtaatcatgccaatcttttgatggcccaaactaatgatatgttgaatcgcctgtttaacactagttcggtcattgacgagaattgaatcgacattgaccaattggttaggactattaatcgaaacaactggaatcgtcatctgtgccagcttttccatcccttgccattcttcgtcggctaaaaaaacaatcaagccatcaaccgcgtgcgccatcagataatcaattttttgattcaccaattgcgcatccccattgaagccacttaataacaaactgtaaccctgcttttcgacaatcgcttcaatgcccgaaacaacttccgcaccaaaacgacttgagatgctgttcatcagcaacccaatcgaaaaactctgattgttttttaagcctttggcaatgatgttttgtttataatccagttgttgaatggcgtctgcaattttagccatattagcggcttttaattgttgaccatttaaatatcgtgaaaccgtaccgaccgaaacaccggccacttccgcaacttctttgacagatgacatgttaattccccacttaaatggataatgggacctcgacctttaagtcagcaatcataatcgtgacgcgttgtgccgttttaactgcctgatccatatccatatatttaaacacttcattcggcaatataaacgtcacggttttttgttcatctggttcaaagccatttttttggaaatctttcaataacttcgatcgttgaatgacaagcccacctgttaatttgacaaaaagtaacgtactttcctgtcccgcatattgtccgttattttttactttaacagttactgtcagtttgtcaacgtcagccttgacttgtaaatctgaataatcaaattgtgaatagcccatcccagccccaaacggatacaaagggctcccagattgatcataataatcatcttgtttagaagcatcccgctggtaataatagaccggtaattgctgcgtattccgtggataagaaaggcttaatttaccacttggattatttataccacttaaggtgttagcaatcgcttggccaccttgttgccctgggaaccagcccactaaaacggcatccgataaagccgtcacttcggttaaatcgtaaggtcggccttggattaaaactgacacaattgtttttttcaattggcttaaccgtttcaataacgttaattgctggccgcctaacgttaaatcggccacatcgacattttcgcctgaatccatattaatccctttagagctcaccgccccattttttagaaaccgcatctcaaaattacgggcactcgaaccccctaacgctaatacaatcacatcggcctcttgcgcaaccgcaattgcttgatcaatcaattcggtctgttgctcgatctgtctgacttcacaaccttgagcgtagacaacttctgcctttttgaaagtgtgcttaatctgttgataaattgtcgccgtcagtcgcgttggactttgtgcggccgtataatcccctaacagatgatagacatcattggcgtttggcccaatgacggcaatcttctgtttggtttgtgttagcggcaatacgccgttattttttaacaacgtcatactttcctgagcaacttgtaagttcagtgtgtcggcttgttgtaagacctctgctagttctgatgctggatcagttaaataaggtcgttcaaataaccctagcaaaaatttcaaggctaatacgcgccccgccgcgcgatctaatagtgattcagacaccaagtcctgcgctaaagcttgatccagtttcgtataggtttgatcccataaacttaaatcaacaccagcagtcaaggccgcggcggccgcttgcggttgcgtctcaaaaacatctgacaaacgatccaatgccgtaccatccgccatcacaatcccttgaaaaccgacttgctcacgtaactgcttggttaacaaatcctgattaatatgacaagggacaccatcaacatcgttgtaagcggccatcacacccgctgcattctgaacactttgtaacagcggttgataaatatctgaatattcacggttacctaacgtgacggtgcctgaattatggccacctagcgcttcaccttgggcaatacaatgtttcaagacaaccccaattggtttttctgtagccaaattcaccggttgatcccagaaactgtgattgctttgaattaaatcgccttggaagccatcgacaacggcttggctcattcgtgccgctaagattgggtcttcaccaaaacattcttcagaacgtccccaacgcggatctttaaccaaatctaaggtcgatactaaggcgaggttaaccccttttagtgctaattcttgcgccatcaattgcgctgattgtttcattagagtggtattaaatgcattcccgcgtccaatattagtcgggtacgaaatcccgtctaatccttgatgcccatgaggacactcttcgacaatcaacgttggaatcccccaacgcgactgttcaatcacgtatttttgcacccgattggccacccgccaactatcctgagcagcaacgccgttttcaaaattgaccttcgaccatggatcggctcgaaataaaccgtataaagcccctaaaccaccgccccaggccacatgttgtttaaagccatccgtcagttgttcacgcttttcatctgcaaaagtttcccacccatatcggttttgattgacctgaccaattttttcttgtgtgctcattcgactcaacaaatcggttacgcgttggcgaatggttaacttagtatcctgatatggatattgcatacttatccctcattctgattaactttattacttgcgataacaaatggtaagaacaaaaagacatctagaacgattaaagcaatcgtcaataacgctgccatatagtcgccaccagttgcgataaaggattgaataaccggtggtgtaatccatggtgctgctgcaacagttttcccaatcaaccccatgctagtcgcaaaataggcaattagtaaattgattgacggaatgattgcacatggaatcatgtaaataggattcataacaacgggtaggccaaacatcactggttcagtaatattgaagaaacaagtggttaagcctaacttagcgacttgacgttgatcttttcgtttagaaacccataaaattgcgatgactaatggtaaaatacaaccgccaccaccaatcaacccaaatgcattcgtgaaaggttctgtgataatatttggaatggctttaccagcagaaaaggccgtcatattttcttggattgattgtagtaatggcgcttggcggaccggtgccaaaatactagaaccatgcattccaaagacccacaagaaatctgagaagaattgtaagaataatgtgccaggtaccgacaacacaaacgattttagtggcgtttgaatcgctaattcaattaatcgtggtacgtttaagcccgtcgttttttgaagaacgaagacaaaaatcccaaaaaccagaatgactgcaatttccggtaccaatgaattaaatgatgttgcaactgctggtggcacaccttcaggcattttaattctaatttttttaaatttagttaaatgaataaataattcggtactaactaaggctgctaacattgctgttgctaagcctgaagaggatgttaaactttgtaaaaaaacaccagttgcttctgcagttttaccattaactaaggttactgtactattaaccggcattaagataaacatgactgcgatacttagaatacccgcatgaactgaactaaacgacgggtcatcaacttgaccgctacgaacatagtgattcgcgagattggccccaatattgtaacaaacaacaatcgatagaatgctcatcgtaccgttactaataatggttgctaaatcggctaatgaacttaaatcgattattttttgaacagctgtattggaaaaaataagagcattcagtaaaaccatcaatgacgccgccatcacaagtggcatggtcacaataaaactatctcgaattgcgattaaatggcgctggttattaagttttgatacaagtggtaataatttctccgataattgatctacaactttcacaaaaacatctccctaatggctataattgaaccgattcaattttatatattagcatgcttaattataatttacaatagcgctttcattgacttgtaattttatttttaattctgcatactaattataatgacatttaaaggagttccccatgattaaacccattatgcacgacccgacttttctcgctcaaacagcgacactagcgactgttgatgataaacaagtcatcactgacctactcgatacattagccgctaatactgaacgctgtgtcgggatggcggccaatatgattggcgtcaataaacgcattatcgtttgccaaatgggcccgattgcgctgccattagtcaatccaacgattatcaaaaaaagcgccccctacgaaactgaagaaggttgtctctctttaacgggtcaacgcgcaaccacccgctacaatcaaattacggttcgctatcaagatcgtcagtttaaaacgcaggaacaggcttttaccggttggattgcccaaattatccaacacgaagtcgatcattgtgaaggcattttgatttagattaaaacaaagctggttaacctaaaatcaccaattatcttaaaatcaagataactggtgattttttgttaatgctcagttgctgaccgcaacgcaacacgcttagttttttaacgtgcttctacccacagattcttgtgcttagctacgtctggtaaacgaagtctaaaacccagacttcatttaccagactaggctaatgctcagaacctaccgtgagtaccagcacttcgatcttaacgtgcttttgagttgcaacaacttccgcttaatctaaaataaccgataatcttaagaccaagattaccggttatttataattaatgctcagttgctgaacgcaactcaacgcgcttagttttttaacgtgcttctcagccaacttcctccgtctagctacgaattgtgaattatgactaaaaccagtcataattcacaattctaggctatactcagaagttcccggctgatcagcactcagcttttttaacgctctaattgacgaaagccacccattgctgggtggctttctaattaatttcgcatattaaattgtaacataatattctgggtatcaagcttgctgataccaccattaaacacgttggtttaatgttcggggcaacttcactagagttgcatgattttaatttaattcgattatgtttaattcttgtggttctaaatattttctcgtttaaacagcgtaagccgcctctttacactacttgtaactccagggttactccagtttgattaaagtcttcaaataatacttgattctacagtgataagtgctgattaactgttaacagtataacatattttaaagtttgacgcaaaatcactaaatattttcagaaaagaggctttccatttgaccaaaattgacctttgctgtaaaatttgatttatagatttcagagtgcttaaactctggttcatataaggaggcaattcaatgttagtacctacagttattgaacaaacgtcacgtggcgaacgttcatacgatatttattcacgtctattaaaagaccggattattatgctatctggtgaagtcaacgatcaaatggcgaacaccattattgcacaattacttttcttggatgcccaagattctgacaaagacatttcaatttacatcaactcacccggtggttctgtgaccgctggtttagcgattatggatacgatgaacttcatcaaatctgatgttcaaaccatcgcaatgggcatggctgcatcaatggcgagtgtcttattatcagctgggaccaaaggcaaacgttttgccttacctaactcaactgtcttgattcaccaacctttaggtggcgcccaaggccaacaaactgaaatcgaaattgctgcgcgcgaaattttgaaaactcggaaacgtttaaatcaaattttagccgacaattctggtcaaacgtttgaaaaactacaacaagatactgatcgtgataactacatgacggcccaagaagccaaagattatggtttgattgacgatatcatggttaaccaacctaaataaccactataaaaagtcaattcttcgcggaattggcttttttagttcataattttttaagacgatccccatttttgctatacttggttaggaatcaaaggaggcttttaagatggatattagtgtcattaaagcagacaaagtcacgatcgacggcggcattgtactgggggccgaatcagcgccgattacgaccgtcgaatttctaaatttggcttgcccttattgtcgtaaatggttttatcgttcggatcaactcttaacccaagccgttaaagcaggtcgcgtccggcggattattaaactcttaaacaaggataaagatgatttacaactggggaatttagcccacacctatttaccgtttgaccaaccggaaacggccgtcaacgcgattcgtttcctatacacacaccaacccacttggcgccccgacttagcgcccaatgaacttgatttgtatcttaaacagaatctaaaattgacccctcaaaataatcaagcggtcttagctgcgattgaacacgaagcacaaacggctaatattcaatttgtccctacgattattctcggtcaacatatttttgatgaatcaattgatctgaccgaattagaacaattaatttcgcaataagcaccaaaaaagggtctaaccagagtagtagtcaactactgatctggttagaccctttttatagcgacctattagaaacggccttcttcaacctgaatcgcatttaaatgacgttcgacttcattcatactttgccgtaattcatgatatttatcgcttgaaaaatctaaatagttggtacaaccgccaacgcgttcgtagatttcatctttttgatcttcagctttttgcgttaatgagacgtcaacgcggcgttcatcatcagccgctcggttacgattaacccagccatcagcttctagacgtttcaatagcggtgttaaggtgccactatcaagttctagatgatgtcccaactctttaaccgacatcgtgccatgttcccataacgctagcatcgcgataaattgtgggtacgttaacctaaacggttttaaaaccttcccgtaaaagtggttgtacgccttttgcgcacgataaattgaaaagcataattgttcatctaataaaactggttcaaccatatttcttcctccaattaatagtgtccactggtaagcatatcatatagaattaaattgcataagttaaactggaccaacaattaaattgtacacctttatatgacgccttgctgataattttctgctaattgatttaattttcttaagcggtgattaatgccagatttagaaatcgccccacttggcatccgttcgccaagttctttgagcgtaatatctgggaattccaaacgtaataacgcaatctcgcggagtttaaccggtagattatccaaaccgatagtgtctcttaaatattcgatattttcaatttgtttcgtcgccgcatcgattgttttatttaaattggccgtttcacaattaaccaggcgattcaccgaattccgcatatctcggacaatccggatatcttcaaacttcaacattgcattcgtcgcgcccactacctgtaagaaatccgcaattttttcggcctctttcagataagtaatgtaaccactccgacgttccgtggttttggcgttcaatccaaagcgattcatcatctgtgcaatatcttgattatgttcttcatataaagaataaatttccaaatgataacgactcgtttcaggattattgaccgaaccaccagccaaaaaagctccccgtaaataagagcggacccgttgatcctcgttaatgacatcctccgaaacctgggtatgaatcgtaaagccatcagcttcaacaatgtttaaatcgttgagcactttgttcgttccgtattttaatcgtacgatatattgattatttttctttaacttcatcttacgacgcactaatagttctgattcaatctgataattttgccgtaacaaactataaatccgacgcgcaatcgccggattttcagtctgaacatttaaaacaaattgatgattcattaaacttaacgaaccattcatccgaatcaaagccgctaattctgcccgcgcgtgttctggatgaacttctaactgggttaattccttcttgacctcactagcgtaagaagccatccttattcacctcgtttagctgtattcacctgaaaagccaagttcataatttcttgaacgactttttgaccattatgaaaaacgccatggttgcgtaattccaaaaaattatcggaaatgacccgacaacccaattggcgtaatcctttaaaatcatgttcaaccggccataaaatttcatcatatttctgatgatctaaatagttttctggcacgcggccggtattgactaacacggtatccacaaaattttgttgcaaatgttcatttaatatctgaacatgatcagcatccgtaaaacgttcggtttcacccttttgggtcatgatattacaaatatagataacttctgcctttgtttgggtaacggcttgtcctaagttttcaatcatcaaattcggtaagatactcgtaaatagactccccggacctaaaacaaccacatcagcagccatgatcgattcaataacttcgggcatcgccgttggttggccttcaccgtcatcagcggtcttcgtcacccaaacgtgttcaatctgtttgcgcgcggctgaaatttcagattcgcccactaattgcgtgccatctgtaaaccgggcattcaacgataatgccacattggcggccggataaacgtgcccatcaacttccatcatttcggataaccgttgtaccgcatcgaatatgccggattccatttcagataacgccgcaataatcagattgccaatcgcatggcccgagaaaaaggcatcgtgtgatttaaaccgatattgaaagatatccaaggttaattgtggtaaatctgataaagcgactaagacattccgaatatcacccggtggcacgacgttgatgtaatcccgaatgacgccagacgaaccgccatcatcagcgaccgtcacaatcgcagtcgcatccgcgttttgttcccgtaaactcttcaagataacggggagtccggtcccaccaccaatgacaaccactttaggctgacgacctttaatcacccgaataatgcgatttgcggctgtcatgaccgattcaccgtttcctttcgtttcttcatatcccgatgggtcacatcaactgggtagtcgacagctaaatcatcggccaaccgttgtgctaacgcgacagagcggtgttgcccacccgtacaaccaatcgcgatggtcacactggttttaccctcttctaaatagccgggcatgatatctttcaacatcccgctcagttgttgataaaacttctcggttgcgggttgcgccatcacataatcacgcactggcgcatctaagccgtttaattctttaaattcaggcacgtaatagggattgggtaagaaccggacatccatcacaatatcggcgtcaatcggtaacccatatttaaagccaaacgacatgacttcaatatggaatgagggattgtcactggttttaaaaacgtgaaaaatttgttcgcgtaattgacgtggtgacatcgctgacgtatcgaccaccatctgcgcacggtttcgaatttcagtcaatagggcgcgttctttgcgaattccgtccattaaccgaccttccatcgctaacggatgagaccggcgcgtttctttataccgtgagaccaattcttcgtctgacgcatctaagaaaagaattttagtggtgacaaactgggtattgtccagattagctaacatttcaataatttcatcataaaaagcacgcgaccgtaaatcaatgacgagcgcaattttagtgaccttacccgattctttaaccagttcccaaaacttgggtaacaaggttggtggcatattatccacacagaaataacctaaatcttcaaaactttgcatggcaacggttttaccggcgccgctcattcctgtaatcacgactaagttcaatgtatctgtcatcttaccactcctcatttatcgctttgctcattgtaacattcctggtgtgtctttgaaagcgaacacaccttatttagccatgttaatcaataaaaaaagttagccaacaggtagaccattgactaacttttcaatttaatttttctgtgttaaccattgtttcttggttagtttcgtaaaatgttcttgtctggtatcgtccaagattggattatacatttcatcaaccgtcagggctggttgaaagccgagtttagcttgagcccgttctgattggtgattaccgtcatagtaaccacaccaaatattggccaagttcaaagcctcgaaaccatgttcaattaaggccgccatcgcttctgggattaagccctgaccccagaatggcacgccgatccaataaccaatttcagcatcatcggcgcccataaaaggttgcccatcgccggagctaatcagttctagcccgacactgccaatagcttcagttggcttggcttttaacgtaacagcatagacctctggtttcattagatattgttcaatcaactggcggctattggccacgctggtgtgaaccggccaacccgcaatcggcccaatcttaggatctttcgcatattgatagatggctgacgcatcatctggggtaaacggtcttaaaattaaccgttttgtttcaatgatcatatttgtttttcctccgttttaatcagttgtacgttttcaattaaaaatcatttaaaaaaatcggtctatcccgcaacttagggatagaccgattttaaatttacatccgtcgcgcaaaagcaatgacgatagcgttaacccctagaatggcaaaatagaaaccaactaaagtcgctaacgtgaccgctgtcacaactggattcatcaagagcaataagccgacgacaatccctaagatatctaagattattgaaacgacgtataaaaacagattgaactgttttaaatgaccaacgtttaataaaccaacaatcgcatccactaggaaccaagccgcaaagacgtaactaatgctaataatgccgactggcacgttgaagatgaacaggaatcctagaataatatccaaaatggcattgatcaacataaagattgcccgaataccggtatcttcacgtaaatgacgatacgcactcaacttggcaatcccacgaataatcgcagcaagtgcaatcaccatcacaaaaccagataaggcaacgccgggtttcttaaataagaaataagccactactagaaaaatcacaccagtcatcagttctgaccaatcaaatttccaatcattctttctaaacatatgcttcaccccatacaaattgatacccttatcatactttttttaacgcaaatgctcaagtcagagtgttaaattattggtctgctaatgttcgttgcatgtcgcgttttagaattggctttaaatattgccccgtataactatcggctacttcggcaatttcttccggtgtcccagtcgcgacgattgtcccgcctttgtcgccaccttcagggcctaagtcaatcacataatcggcagtcttgatcacgtcaaggttatgttcgatcactaaaatcgtattgccttcgtcaactaaccgttccaaaacgactaataggcgtttgatatcatcggtgtgcaaaccagtggtgggttcatccaagatgtataaatttttaccggttgattgtttttggagttccgctgctaacttcatccgttgggcttcaccgccggaaagcgtcgtagcggattgacctaacgtcacgtaccctaaaccgacatcgacaatggtttgtaacttgcgcgcaatcttcggaatgttttcgaagaaggccgtggcttcttcaaccgtcatcgctaaaatctgcgcgatgtttttacctttgtaaacgacttccaacgtttcagaattataacggctaccatgacaaacttcacaaggcacgtagacgtctggcaagaaattcatctcaatcttaataatgccgtcacccttacaagcttcacagcgaccgcctttaacgttaaaactaaagcgacccttcttgtaaccgcgtaacttcgcttcattggtttgagcaaataaatcccgcatgttatcgaagacactcgtataggttgccggattactccgcggtgtccgaccgattggactttgatcgatatcaactaatttttcaatattttgataaccggtcagtgttttatattgacccggtttcgccgaattgcggttaatcttttgcgccaatgctttctttaaaatcgtattcactaacgttgatttaccagaaccggaaaccccggtgaccgcaataaaatcacctaacggaaaatcgacggttaagtctttcaggttattttcagccgcaccggtcacccgcaatttcttaccgttgcctttacggcgcttcaatgggactggcacgtattctttacccgctaaataccgacccgttaacgacttcggattttgttcaacctcggttggggtccccgcagccatcacgtgaccacccaattcaccggcgccgggtccgatatcaatcagataatcggctgcgcgcatcgtgtcctcatcatgttcaacgacgattaacgtattccctaaatcacgcatcttctttaatgaaccaattaatcggtcgttgtcgcgttgatgcaaaccaatcgacggttcatctaagatgtagagtacaccggataagttagaaccaatttgagtcgccaaacgaatccgttgagcttccccgccggataacgtcccagccgaacgactaagcgttaaataatccaaaccaacattcatcaagaaggtcaagcgatcatggacttccttcaaaattggtttcgcaatcatactatctttttcggataatgttaaagcttcaaagaatggtaacgcctctttaatcgcattcgcagacacggccgcaatatcttgtcctccaaccttaaccgataaggcctggcgatttaaacgcgcgccgtgacaggtttgacaggttaattcagtcatgtaggtccgcatctgagtccgcgtgaaatcactgttagtttcgcgataacgccgattaatattactgatgaccccttcaaacggtacatccacatcgcgaacgccaccaaaatcattctcataatggaaatggaattctttgccttgggagccgtttaaaatgagctctttttgtttgggcgttaacttgctaaatggccgatccatatcgattttaaacgaggtacacgcctgttccaacatctgtggataatattgggaactaatcggattccacggtgcaatcgcgccttctcgcaacgtcttagtggtatctggaatcactaaatcagtatcgacttctagctttaggcccaaaccatcacattcaggacacgccccaaacggtgcgttaaatgagaagagtcttggttctaattcgcccactgtaaaaccacaaaccggacacgcataatgttcagagaataatagttgttcaccatcaatcacatccgcggtcgcgtaaccttcagataaccgtagggccgcttcaaacgaatcaaataaacgagaacgaatgccctctttaacgacaatccgatccacgacaatattgatatcatgttttttattcttatccaattcaatctcggtactaacgtccatgacttcgccgtcaacttgaacacgtacgtacccttcacgttgaatcttttcaaaaacttttttatgttgaccttttttagcgcgaataatcggcgacataatctgtaactttgtccgttcaggtaggtccaagacccgatcaaccatctgctcaaccgattgactactaatttcagtgccatcgttgggacagattggatgaccgacccgcgcccacaacaaacgcaaataatcattgatttcggtcactgtgccgaccgttgaacgtggatttttggaggtcgttttttgatcaattgaaatcgctggactcaacccatcaatcgaatcgacgtccggtttatccatctgacctaaaaattgacgcgcatacgctgataaactttcaacgtagcgccgttgtccttccgcgtataaggtatcaaacgccaaggaactcttccctgaaccagataaaccggtaatgacgaccagtttgtcccgcggaatcgtgacatcaatatcctttaaattatgcgcccgcgcgccgtgaataacgatcttatcgtttgccatattctacctcttttaatcaatttcactctttaattctagaatcgtatcccgcaaagtagcggcttgttcaaagtcgagtttcttagcagccgttctcatttgttccgttaaacgttcaaccatttcacgtttttcagccttcgacatactatcgaaatcaacctcattggtcatcttaatatcttcaggatgatcgactgattgcacaactgaaatcgcatcacgaatcggtttaataatcgtggttggtgtcatgtcatgtttcagattataagcttcttgaatttcacggcgccgttgggtttcactaatcgcccgtttcattgaatctgtcactttatccgcgtacataatcacttcaccatgcgcatttcgagacgcccgcccaatggtttgaatcaaggaacgatcactgcgtaagaaaccttctttatccgcatctaaaatcgcgactaacgacacttcaggcacgtcaatcccttcacgcaacaagttaatcccgattaagacgtcaaacttgcccaaacgtaaatcgcggataatttcagttcgttctaaggttttaatatcactgtgtagataacggactttaacgcctaactctttcagataatcggttaaatcttcggccatcttcttggttaacgtcgtaataaagacccgttcatctttttcaactcgctgattaatctcgccgactaaatcgtcaatctggcccataattggccggacctcgatattcggatctaataagccggttggtcgaataatctgatcgatttgcaaatcggtttgttccgcttcgtaaggtcctggcgttgcggaaacgtacataatctgattgacgtgtttctcaaattcaggcaaggttaatggccgattatccaacgcacttggcaaacgaaaaccgtaatcgatcaacatctgtttccgcgcgcgatcgccgttatacatcccacgaatctgcggcatcgtcacatgcgattcatcaatcatcatgatgaaatctttggggaagaaatcgatcaaggtatagggtggttcgccagcttggcggtcttccatatggcgtgaataattttcaatcccggaacaataacccatctcttgcatcatttctaaatcataattagtgcgttgttcgagtcgttgggcctccagtaatttattttcagcattcaacgctttcaaacggtcagctaactccgccttaatactctcaatggctcgttccattttttcatcattagtcataaaatgggtcgctgggaaaatcgccacatgctggcgctcccctaatacttcaccggtcaaggcatccacttcaacgatccgatcaatctcatcgccaaagaattcaacgcgcatggcgtgatcatcacgcgatgctgggaaaatttcaacaacatcaccacggacccggaagcggccccgttggaaatcgatatcattgcgttcaaactgaatatcaactaattggcgcaataaatcattgcgttcaatcgtcatccccggccgaatcgataaaacatgattttgatattctttaggatcacccaaaccaaagatacatgaaaccgacgcaatcacaatcacatcgttgcgttccaacaatgaactcgtcgctgaatggcgcaatttatcaatttcatcattgatgctcgaatccttttcaatataggtatcactggaaggtacataggcttccggttgataataatcataataactcacgaaatattcgacggcattatccgggaagaattgtttaaattcaccgtatagttggccggccaaagttttattatgcgagataattagcgttggcttgtttaaattcttaatcacgttcgacattgtaaaagtcttaccagtcccggttgcgcccatcaacacttgcgccttagcacccgcttcaaaattcttagtcagggtctcaatggccgccggttggtccccagctggctcataaggggccactaatttaaattggttattctcttgtcgatcaatcatcaaaagcctccagtccaattatgctcgcgacaaaagaagtttggacaataaattgcccaaactctccttaaatcgtctgatgttctttaagtcattcactattctaacataccgaacatattttcgccacacttacgattaagcctggtttgatagggtttgacggaccaattgggttaacttaccgcggtccgcaaaatcctcactcaagagatcaggtagcatttcttgaatgaaataacgcgcgctggcgagttgttgataatgcataatcgttttaagactttccgcaaaaatttcgaggaaggcattttctggattacccttttcaatttcgccaaatgactcgtataagagatcaattttatcagcgactgataggagttggccttctaaagtttcatctttaccttcgctcaaacgtcggcgataccgttcttgtaaaaaatctggaatttcattattgataaagttatcggttaacgaactttcaacgttcgctaacatttgtcgcaattcttgggtcgcatatttaaccggcgtcttaatgtcaccgatgaagcgttccgtataatcgtgattcaaagcccgttcgtacaacacttgccatttcacttcttggccgctttcttcttcgatatcccctaagagttgcgcaatttcagcgactttaaaagaatgcgatgcaaccgaatgttcttggtacttaaacaaccctggtgcccgtctgatggtctctaaactatttaacccttgtaaatactgatgcatgcccattcttaaattcctccattcttacaaaaatagaccgactcattatgcagtccgcctattcgttgaatctattatagataatctgacattaaaagtaaatcagtaacccttatttaacgagtttttgaatcgctttttcaaagttggctaatttcaaatcggccgttgcttcatcatccgcttgtgtcccgacatagaacttcactttaggttcagtcccactaggacgaatcgcaatccaagtaccatcttcaagatgatatttcaaaacgtttgaacttggtaagttgatgacttcactgtgaccatccgcaaacgtttgggtttgtgcttggaagtcttcagcagaagccactttaattccagcaaattcaaccggactttcttgacggcatttaaccatcaagttggccatttgttgtgggccgtcaacgccttcaaaatcaatcgcagtcgtttgttcagcgtagtagccatattcagcatataattcttgaatgccgtcatacaacgtcttaccgtttgatttatagtaagcggccacttcagctaacaagaccaacgtttgaatcgcatctttatcacgtacgaatggtttaactaagtaaccataactttcttcaaagccaaacatgaacgtattctcgtttgtctcttcaaaatgttgaatttgttcagcaataaatttgaagcccgttaagacatcaatcatcttgacgttgtaactagcggcaattttagtcgctaattcagttgaaacgattgatttaacagcggccgcgttagcgggtagtgtccccgcatctttgctggcttgtaaaatatagcgcaacagaactgaggcaatttggttccccgtcatcaattgataactaccgtctggttggcgcacagcggcccctaaccggtcagcatcgggatcagtggcaatcaataaatcggcttgttgtttctggccaagttcaatcgccatatcaaacgtttgtggaaattcaggattagggaatggcgttgttgaaaattcaggatcagcaattgcttgttctggcaccatcgtgaattgttcaaacccagcttggcgtaaagcccgttcgcctaaaactttcccagttccgtgaagtggtgtgtagattaaagacatcgttttaccgactgtatcgactaattcttggttaatcgtgactttcttgacttcagctaagtacgcttgatcgacattttcaccgattaacgtcattaacccggcttcgcgtagtggtgattcatccgccacttcaatcgcgaataaatcggtcaccttacggatataatccgtaatcatgtcggattctttaggtggcatttgggcgccatcttcgccgtaaatcttgtaaccattatattgttttggattatgactcgccgtaatcatgatgccggcataggtgtttaaatgccgaacagtaaatgatagttctggtgttggacgaagcgcatcaaagacaaacgaaggaatttgatgttggcctaacacgcgagctgcttcatgtgcaaaggtttctgattggtaacgtgaatcgaaactaatcgcgaccccgcgttttttagtcgcatcaggtaaagtttccataaactgcgctaaaccttcagtggcttggcggacagtgtagatgttcatacaattaatcccagggcctaagagtccccgcatgccggctgttccgaattccattggcacactaaaagcacgttcgagcgcttcttggtcgttcgccatttcagttaatgttttttgtaacgctaaatccatgacaggttgttgctgccaaactgcataattatcttgccaactcatgttgtaacccccgaatgtaatctaaaatatcgaattaattataccataatcaaccgctttcctctgccactagccctaatttaatcgaacttttactttctgaacacctagaccaatcaaaaaaagcggcaagcctcttaatgttaagagacttgctgctttttgttaatgctcagttgctaaccgcaactcaacgcactcattttatttaacgtgcttctcaagtagccttttccggttaactacgaatcgggcatcatgagtcaaaaccactcataacacccgattctaggttaatcctcaaagcctaagcaacttgagtgagcacttcgacattaacgtgcttctcagccaacttcttccgtctagctacaaatcaggcgtcatgactaaacccgtcacaacgcccgattttaggctatactcagaagttaaccggctgagtcagacacttcgacattaacgtgctcctactcacagattcttgtgcttagctacgtttcgcaaacgaagtccacaatccggacttcattcacggaactaggctaatgctcagaatctaccgtgagtatccgcacttagatactttgaatatatttaaagacttcttgacctgctatgccgccgtcacctactgctgttgtgatttgacggaggtctttttcgcggacatcaccaattgcgtaaatgccagggacttttgtggccatgtggtcgtccgttttaatccaacccgcatccgttaaaatacctaaatctttaaaagcggacgtcattggttcgataccgacatagatgaaaacgccgctagcatcgatttgacgcgcttcgccagtttctttatcggtataagtcacgccactgactttcttgtcatcaccttcaatggtttgcatttgagcattccagataaaatgcatcttatcattatcaaaagcacgttgttgcagaatttcttgcgcacgtaattgatcacgacggtgaatcacagtgactttacttgccagttgtgtcaggtaaatcccttcttcaatggctgaatccccgccaccaatgacaacgacttctttgttcttgaaaaaggcgccatcacaaaccgcacagtatgaaaccccacggccactgtatgtttcttcgccagtcacccctaattttttgtgttctgagcccgtcgcaatgatgatcgcacgaccctcgaaatcaccttgatcagtgtgcactagtttaatctcgccttggtcttcaatactcgtcaccgtaccgtaaccatattcagcaccaaattgcgtcgcactggcgtacattttttcgcctaattcggggcctaaaattgatttaaagccaggataattctcaacctcagcggtgttattcatttgaccaccataaatcccgcggtctaacatcaatactgataaattcgaacgtgacgcgtatagcgcggcagtcatcccaccaggccctgcaccaatcacaattacatcgtaacttttagtcatcttaataatccccttacttttcagaagtgtttatttactctaagctaatcttacccgctcttaaaaaaaaagtccaccaaactgtttaccagtttgacggactcgtctttttcaactcttgcaacaagtcagttgcttcagttgcaaaatctaaatcaccactctgcagataggccgttgcgagttgaaaactagcctgcatctgatctaaaaatgcataagccgtcgccagaaaatattgaatctccggatgactttggtaattggcgactggaatttcttccagtgccgccaccgcattctgatactgaccgaccgactccaaacaaatcgctagctgacaaataacaaagatataatcatctttcgtttttgctaacgttttggcttgttgcaaacaatttaaggctttcgtgtactgaaaccgttcaaaagcttgcatgccacggtcaaaataaaattcacaagttggtctgattgttaccaaatcacccataaagtaatcggttctcctttagtccatttcgttcaactaaagattataataacacagatttttaacgggcgcgatacagatttaagatgattccggtttctaattctcatatgctaaaaaataaactggatgttatgagtaacgaacactcataacgtccagttctaaattaatggttaaagcttaatcaatttgtgtgagcacttcgattttaacgtgcttgcactcacagcttcttgtgcttagctacgtttcgcaaacaaagtccataacccggacttcattcacggaactaggctaatgctcagaagctaccggtgagctccagcaactcgacacacttagttaaagtctatttctggtttgcctgagcgttgcattaagttgccaatttcagttttaatatcacaatcgcgatataggacattataaatcgccgtcgtgattggcatttcaactgaacgttgttgggctaattcgtaggccgctttacaggttgcaaccccttcaacgaccatgcccatattttcaaggacttctggtagtttttgtccttggcctaacgcgttacctgcacgccagttacgggaatgcacactagtcccagtgacgattaaatcgccaacgcctgataacccgataaaggttaacgggttagcgcccatcgcgacaccaagacgagaaatttcagctaagccccgcgtcattagggcggccttcgtgttgtcaccataacctaggccgtgtaacgcaccggcgcctagcgcaatcacgttcttcaaagccgcacccatttcaacaccaacaacatcggtattggtgtacaagcggaaataatcgttcataaaaatttcttgaacccattcagcttgcgcaagatccgttgaagcggccgttaacgttgtaatatctttcatcgcaacgtcttctgcatggctaggacccgataaaacgacaatcccgttacgaacgtctgccggaatcgtttccgtcaagacttcagaaatccgcttgtgcgtccgttgttctaggcctttagaggccgtgacaatcactggtttaacttgtttagctgctaaaacaggtgcaatttgttcagctacttgtcggatcacttgcgttgggatgacgaataaaacaacgtcaacttgttcaaacgcttcatccaaatctaaagtagcgtgtagttgtggattaattttaaaatcgggtaaataatgtttattcgtatgttgctcattaatttcagccactttttcagcgtcgttgccccataattcaacgtgatggccattttcgactaataaattggctaagattgtgccccatgaaccggcacctaaaactgcaatattaactgtcataatttaattttctcctctttaatatctctgcgttaaattaccggctaaatagccaggcacttgtttttgacggcgccgccaaatccaaaccgcgattgcgccaattaataagacaatcgacacaatttgagaaactcttaatggtcctaagtataaactatcggtccgcatcccttcaacaaagaagcgaccaaacgcgtaccacataatataactgagtaaaatttcaccttgtttaaaccaaccggttcgatgacgaatactcattaaaatcgcaaacccaatgaggttccagaccgattcgtataagaacgttggttgtcgataactgccatcaattaacatctgttgaatcaaccaattcggtaaatgcaattgttgtaagaagtgtaatgacgtcacgccaccataggcttcttgattcataaaattaccccagcgtccaattgcttgggccaacataaccgttggtgcggcgatatctaaaatcaaccacgccgacaacgcatgattccgacaataaataatgaagacaatcgatgccgcaattaaaccaccataaatcgcaataccaccgtgccaaatcttaataatttcgcccggattagcttgataataaggccattcaaaaataacgtagtatagacgcgcgccaattaatgaaaagggtaacgcccataaaatcaaatttaaaatatcatcttcactcactcggcgacgcttcgcttcttgcaaggctaatgccactgccaagacaaccgcagtcgcaataatcacgccgtaccaatgaatctcaagtggtcccaactgtagcgcaatcggattcaatgcacctactaataaattcaaagtcatcgctccttaatccacaaaaaaactagattgattactgtttcttttaacagtatagctcaatctagccaattgacctaccaaaataggtcattttttctattttttaaagtctaatcttcatccgaattagattcaattaacttccctaaattcgcttcaaaggtcttcgtcgcatcatagcccattgaacgtgcccggaagttcatcgcagccacttcaatgatgattgccaagttccgacccactttaacgggaacggtaatcttaggcactgggacgtcgaaaatcaattgttcttcggtatccgaacctaaacgatcatatttcttatcttgatcccagttttgaagattaacaatcaatgaaatggacgtttcggcacgcactgcaccggcaccaaagaggttcatgacatcgataatcccaatcccacgaatctctaataagtgtcgtaaaatcgcaggggcttcgccgacgaccgtttgttcatcttgttgataaacatcaacacgatcatcagcaatcaatcggtggccccgtttaacgagttccaaagcggtttcactcttaccaacaccagagtcacccgtaatcaaaacgccaagaccataaatatcgactaaaacgccgtgcattgagcgccgttcagccaattgaccatctaaataatccgtgattaaactcgataaccgggtggttggtaatgacgaccctaaaactggaatcccaacttcagccgctgctgttaacatttcagcaggcgcctctaaaccccgagaaattagaaaacaaggcgtgtcttcaactgacatccgccgcataatcattaaccgctcttccggtgtcatattcttcgtaaatgagacttcagtccggccaaataattgcacccgttcatgtgggtaataattgaaataacccgttaattctagccctggacgcgagatatcactcagagtcacaacgctgtcttttaaatgatcttcacctgaataaacctgcagtttaagatcctttactaatttttcaattgaaacactatcagccatgatgtaccgtccttctctttcacttatacctactatcatattgcttttaggtccgtttttcaacattaatgtaggcgttttctaaaagttatttaaaagtgtctatctcatctggtattaaatgccagtccaatctaaaatgtaattgataacgtgcttctcaagtaaccttttccggttaactacaaaatcagcgttatgattcaaagtacaaatcataatgctgatttctaggttaatcctcaaagcctgaccaacttgagttagcactcagactataacgtgcttctaccgataagtttctgtgcttagctacgtctggcaaacaaaatccatagtacggcctttattcaccagactaggctaatgctcaaaacttgaacatcggtagttagcactcattttaaataacgtgcttttgggctgcaacaacttccgcttaacctaaaattcccaattatcttaaaaaccaagataactgggaattttctgttaatgctcagttgctgaccgcaactcaacgcacttattttgtttaacgtgcttttgattgcaacaacttccgtctaatctaaaatttccaattaatctaaattctgattaattggaaatttttattagtactcaattgctaaacgcaatcaagtcagcacttatttgcacttaatatcgttctcttgaaaattgattggtaataatcgtattcgcaagtgataaaataatcgccacgataatcgacgctccgaaactgggaaaaacaaacccagtgacaaaaatcgatgtcaactgaagcatgatgccattaatcacaacgctaaacaacccaagggttaaaaaggtgattggaaatgacaacaaacttaaaatcggtttaattaaaacgtttaagactgataagacgatactcgcgattaacgcgacccagatattgctaacaaagaataggctaggcaataatcctgaaatcgcaataaacaataaggtgtcaactaaaacacgtgtccaataacgcactagaaatcactccagtcatcatcatccaccttgacgtcgcgtgcttctttacgctgccgaccactgctcgttggacgtgctgctggtcgttgcgtatgcgcataccaatcacttgattgatcatgacggtggtgatgtcttggccccgcaatcactcggtagatgacccagatgattaacaaaggcacggctaatttaaaaactagaaaaacggaaccgattaataaaccaatcagggcgatcccaattatcaggataattaacggccatagtagtaatagaaatggcattagaactcactccattcatcatgagaatcataatcggatcgacttggcttttcaggaatgactaacgccaagataatgtacacaataatccctgggaatgcggctgagaaaaatgagaataggaagtaaatcacccgaaccaacgttggatcaacgttgaaatattcagcaatcccacccattaccccagaaatcattctgttatttttggatttatatagtcttctgtctgccataatgtcaccattcactctcttttaattaattatcgttatcttttaataaaatattacccgtcgtggtacttaaggtcaattgtgcaacttctggcgcttcaaagcgcgttagttgtagcatctgactaccagtactttgacgttgatcaaccgtttgagtattcgtcaaacgatttttaatcgccccaaaccgggtccgggactcagccgttaagccgagggttgctggtaaacctaatttaacattaccattaaccgacttcgccttcaaatgttgtaaactattttcagttaatgtcgccttaacatcgccattaacagtcgagacactcgcatttagaatttgtgcttttaacacgatattaccgttaacagtcgttgctaagatgtcgtcataacggccttgggtcatcgtaatgcccccgttgacgttctcagcttcaaccatcgccgcgttggtactcattaaggttaattgtccgttagtcgtcttgacgtagatgtcacggcctgtaaagccgtctaattcaatatccccgtttaaaaccttaacgttggtttgttgataattattcgctggtaagtagaaaattaaatcggcttggatccgtttattcggcacttggaacactaagtcatcctcagtcacactgatttggctccgtgcttcaaaggcgtcaatggccgtttcttcaaccatcttaccatatagtttgatttgcgccgtcactttaatttcgggttgatcccagattctaaagttaacactaccgttagcaaccttgacgttaatcatatctgggtgcacgttgggataaacaaaatcatgtgtgaacttttcagttgctaatcccggtacacggaagttaacgtctttccaatcgacattatccatgaccgttttagcggtattcttcatgaatttgccgaattgattgccggcttcgccgagtttatcactcaattcatcaaacgtttcactggcattttctttccagtcatccgataagccaagcttttcggaccattgatttttagccatctggcggcgttctttttctaattgattcaattcatcagtcaacatcttgcgttgttcttctaattcgtcaatctgaacttgtttttgtagaatagtggcttttaaggtttgacgttcgccagctttttcggccgttaaactgtctaaatcttccatcgtatcaagtacagtcacttgttcttgatcggcgtgcagtccttgttttaaatcttgcaattggcggttaacacctgataaagcgaccgttaattcgtgcgcctgttcttcaaccgcttctttttgtttatcttgtttttcttgattttctgctgatgtttcagtttccgttggttggtcctgcgttactgtacttgtcgcttgaccttgatcgtttttggctaaattttctaataaaactaacgcttcttctgaagtaataatcccttgattcactaagtctaatattctttgacgttcattcattgttttgacctccattgatctaaaaactgccaacatttttgttgcacttgactatggttctattatgcccagtttccagtgaaatgtcataggtccaaaggttgatttttaattaggtatccagcggtataaaaagccatcaaaaaaatccgattatccctaaattcaggataatcggattttcaaacttgataggcaattgataacgtgcttctcagccaacttcttccgtctagctacgaatcgcaaatcatgactaaaaccagtcataattcacaattctaggctatactcagaagttaatcgtctgagtttagcgcttcgatcataacgtgcttttgagttgcaacaacttccgcttaatctaaaataaccgataatcttaagaacgagattaccggttatttataattaatgctcagttgctgcccgcaactcaacgcacttcttaaaaatcgtcttctttagcgtttgaatttaattcgaccactttacccgtacgtaagtaaatgatccattcacagatgttcgtcacgtaatcaccaattcgttctagataactagcgactagcatgtagtccatactgccgacgaccgtttctgaatcacgttgcatttcttgaatacaatcatcatagatattatctgaataagcattgatggcaacatcttctttagcaatcgttaaagcccgtttgcggtcttctttaacgtaagcgtccaatacttcttcaaccatcgtcttcactttttcagccatatccgcgatatctttttcaatatctggcacacgggtattgcctttgacccggatggttgatttcgcgatggataccgcgtgatcgcccattcgttccaaatccgaactagccttcataatcgtcacaataatccgtaaatcggttgaaaccggttgttgcaaagcaattaactcaaaacttttacgttctaaatccgtttcacgttcattaatcttgtaatcatcatcaattacctcatgggccaattgcttgtcatgattaataaacgccttaacggatttatagatggcttcattgaccatcatccccatttcagaaaagcggacatggagatcgtttagttcatcttcaaaaagtcttctcataatgtttcccttctttcttagccgaatcggccactgatgtaatcttccgtttgtttttcggatgggtttaagaaaattttcttggttggtgcgtattcaattaattcaccttgtaaaaagaaagccgtcttgtccgaaatccgggaagcctgatgcatattatgcgtcaccattataatggtatactgttggcgcaattctagcaacatattttcaattttagcactcgaaattggatctaatgctgaagttggttcatccattaagatcactttaggtttaaccgccaagacgcgcgcgatacacacccgctgttgttgaccacctgaaagtgataatgcactttcgtgtaacttatccttcacatcatcccaaacagcggcttgtttcaaactactttcgaccgcttcgtccaagatgcgatgatctttaacaccggctaaccgcaacccatacacgacgttatcgtagattgagaacggaaagggattgggttgttgaaacaccattccaacctctttacgtagtttaacggtatccatttctggtgcgtaaatatcttgaccgtttaataaaaatttgccagttactttggccgaatcaatcaaatcattcatgcgatttaagcaccgcaagtaagttgatttaccgcaaccagatgggccaattaaagccgtaatctcattttcattaaaatcaatgttaatgtctttaagcgcctcgttcttaccataaaaaagatgaacatccgaggattcaataatcttatttaccactaggtaaacctccctaatttctagccgaaatgaccagaaacgtaatcttctgctgctttaatcttaggccgcgtaaagatcttacgggtttcatcgaattccaatgcatggccagaatggaaaaaggccgtatagtcactaatccgcgctgcctgttgcatattatgcgtgacaatgacgattgtaaatttttctttcaatcgaattaaggtctcttcaacggtattcgttgaaatgggatctaaagctgatgcgggttcatccattaacagaatatcgggtttcatcgcaattgcccgggcaatacagagccgttgttgttggccaccggataacgccaaagcactcttaccgagcgaatctttgacctgatcccataacgctgcttgttttaacgaggtttccacaatttcatctaagtatttcttatccttttgaccgtgttgcttgagggcaaacgtgatgttatcgtaaattgatttagcgaacggattggggcgttggaaaaccatcccgatatgttcgcgcattttatagacatccacttcgtcactattgatatccacgtcacgatacataatctttccggtcactctcgtgttagcaatattatcattcatgcggttcaaactacgcaagtaagtcgacttgcccgaaccagaagcaccgattaacgctgtaatccggtaacgttcgaattgtaaagatgcgtcaaacatcgcctgtttatcgccatagtagacgtttaaattttcagttgataacgcaatttcatgtttcgtttccgaaaattgtttaatatgtgttttagttaaatcataatctgccatttatttctcctatgatgctgtcattttacggtaaacatgtttgccaatcacacgggccaaccaattgaaaaggagtactgcgatgattaagaccgctgaagcgccggctgaaacggccgaagcatcgggcataatcccttctgaattaatcttccagatgtgcacagccagggtttcagctggtcgcattggattcagtggactcgaaatgttcgctggattccagttcgtaaaatctaaaaccggggcactttgaccagcagtatagatcaaagcggcggcttcaccgaaaacccgacccgcacccagaatcatcccggtaataatgtttggtaaagcttctggaataatgacgtgtttcaccgtttcgtaacgggataaccctaaagcaagtcccgcttctcgttgtgtgaaatgaattgattttagggcatcttcgacgttccgggttaataacggtaaattaaagaccgtcaacactaacgcccccgctaaaattgaaaagccaaatttaaattggatgacaaagactaagaaaccgaataacccaaccacgaccgatggcaatgagctcaacacttcaattgccgtccgaatcacattggtgacccaattcttaggcgcgtattcagccaagtaaataccggcaccaattgataatggtactgaaataatcattgataagagcaataaataaaatgaattaaagagttgaatcccgatcccaccgcccttggtaaaggtttgcgatggtttagtcaaaaagccccaagtcacgtgtggcaagccccgaactaagatatagccgagcagactagccaataataagacgataaagccggcaattgccgttaatacgcctgttgcaattttatcccattttttagcatccattagcgactaattgctcccttccgaccgattaaacgaaccagtaagttaaacatgagtgacattaataataagagtaaagctaatgaccataaagcgttattagcgagtgagcccataaccgtgttcccaattcccatggtcaagacactggttagcgtcgaggctggtgtaatcaagttgtgcggtaacaaggccgcattcccaatcaccatttgaaccgctaatgcttcaccaaaggcccgcgccatcccgaaaacaaccccggttaaaataccaggtgtcgctgcacgtaagacaactttccacgttgtttgccaacgcgttgcgcctaaggccaacgatgcttctcgataataacgtgggacgctcttgagcgcgtcgacagtcatcgacgtcaccgttggtaaaatcatcacgaataagacgcaggttccggctaaaatcccaaaaccactgcccccaaaaaccgttcggacagcgggaacaatcactgataacccaatgaacccgtaaacaacggatggaatcccgactagcaattccataacgggttgtaagattttttcgccccgtttaggtgaaatttcagtcatgaagattccggcaccgatcgcaaacggtgtcgctaataatgccgctaagaaggtgaccccaaatgagcctaaaatcatgggtaatgcgccaacttctggccgaccatgactatctttcagacttggattccaactactctgtgttaagaatcggcctaggttgaccttgtcatgaaagaacgttgctaaccctttagacgccacaaaatagaaaatggctaatacgataaagacaatcaagctaatgcaaaacaaactcaatagtttcccacgcgtttcacttttagccgctcttgatttttttaataaacttgctttaattggatccatcttcgaccacctacttaaccttcgtaattgtgccagtcactgaccgttcaacttgcatctgtgaaacaggaatataacccatcttaccgacttgtttgttctgcacttcatccgataaaacgtatgccaagaatttcttcgttaaaccagttggttggccctttgtataaacatgttcatacgaccaaattggccaagcattcttaaccacgttggcatcggttggcgcgatgccgtctaacttaagagtcgcgaccgtcttatccacgtaagaaaaggctaagtaactgattgcccctggcgtattggccacgattgaccgcaccatcccagttgaatcttgttcttgagctggtttcgttttacgttttttcatgacccattgttcaaacgtcgtccgcgtgccgctaccctgtgctcggttaataatcacgaccgcttgatcgggcccgccaacttgtttccagttggtaatttcaccgctaaaaatttgggctaattgtgtcaacgttaaattcttaacccctaattgtttattgacgactggtgtaattcccacaaccgccactttatgatcgactaattgatcggccttaatcccggccttttcttctgcaaataaatctgaattgcccatttgaacggcgccttcttgaatctggctgaggccagtcccggaaccgccaccttggacgttaataaattgacctgaatgttgcgcactgtattcttcagctagcgcttcaattaaaggttgcaatgctgacgaaccaaccgccgtaactgattggccattttgttttgattggcatcccgccagtagcatcaaactgcaagctactaaaaatccaattacaccacgtttgcgcatcataaatcctccacgaattccatttaaaacatcgatatctttattataaaaaatgattgtaaaatctaatactgctcaatgtaaattttgtgtaaatcactgattgggtaacgttaaaataaattcactaccgacgcctagttggctttcaaccgtcaactgaccgcctagactttccgttagttctttggcaatcgctaaccctaaaccggtcccactcttatgggtcgcacgagcttgatcgactcggtagaagcgttcaaagattcgatcttgtaaatcactcggaatcccctgaccagaatcgaccacccgaatctcaatttgctgcatggcattttgttcagcagtgatcacgagcgaaccggctggtttattgtacgtaatgccgttcgcgattaaattcttcataatctggttaaatttcattttctgaatccgaatttgtaaatcggccggtatttcaaccgagacgtgtaacgcttttttctgaatcttttgttggagcaataataggttttgttcaatcactggtttaatcaatagcggttgcgccttaatctgttctttttgatctaaatgcgacaacgctaaaatatcctgaatcaacgccgttagacgcgtactttcgtcataaataatctgcaaaaattgttgtaaggtggctgggtcatccttggcccccgctaacaaggtctccgcaaaaccagtaatcgcggtcaccggtgttttcaattcatgactcacattgctgacaaaatcgagttgcatctgttcgacccgccggatatcggttaaatcgtacaggatgaccaacgcttgaaatttagacttaacggtattcagttggaccacgttcgcgtcaacaaaccgttcctggttttgaatcaattgaatctcttgatgatggctacgccgatgtctgaaagtatgttcaatcatccgcgttaattcatacgttttaatatcatcaatatacgggtgtttccgatcctcaatctgcgtttctaacagttcgccaatcgcttcgttgtgtaagacgacctgccgcgcttcattaatcaccatgacgccaaccggcagatggtcgattaaccggtcaaaactgccctgttgaatcgcaattttttggcgcatatggcgcatatcaccgtttaatttattaatctcgtccgctaaaacatataacgaggcgtctcgctggaaaataatcggttctggtaactcctcatgtcggatatggtgaatattggccaccagaattttcaaatgcgttgcaaaccggcgtcgatgttgccaaaacttcaataagattaaaccgcaaatgatgagatacaaactcgtcagcgtcaacgcaaaagtgggccaagtctgccaaaagcggtgttgtgcggtcactaggacaaaggccgtctttttagtttgataccggtagaataggtaagattgcccactgactttttgaaccatttgggtatcctcggtcgatcgctcccgatttaaaatgtcattagcagttttttgcagttttgttttttgtgcagattgttccgtcaccacttctaactggttttgaatcaaccatttttgggcctgaaaatctggttgtttatgtaacagggcataatccgcccctcgtgccgctaaagtggtcatttgttggcgtttgaccaccgaattaaacgtcatcattaaagctatgtaaatagccactaaaatcgtggctattctgtaaaatctgatttgatcatgcttagtcatggttgggatcctccaattgataaccaaaaccacggactgtttttaagtaaccgggatggcgcggatcatcttctattttttcacgtaaatgactgacttgaatatcgaccatgcgcgtttctgctggataatcgaacccccaaaccgcatttaaaagcttctcccgactttgaaccttattgactcggtgcataaaatacgccaataattcaaattctttcggggttaaatgtaatttatgattattctttttggcaatcacttcggtttcatcgaccgttaaagtgccaacttgtaaaatagtcgcaactggttcatcggtcggttgcgcggtagtttgcgtccgccgttcaatcgcccgaatccgcgcgataatttcccgggggctaaacggtttagtgacgtaatcatcagcaccaatttctaggccaacaatcttgtccgtttcgctatctttggccgtcaaaatcataattggggtcgctagtttggcttcccgaatctttttggtgacggcaatcccatctaatttaggtaacattaaatccaaaataatgaaatcaaacggttgttgcaacgccatctcgagggccattgcgccgtcggttgccgtcatcaccttaaaatgctcttgttccaaattatatcttaataacgtcaagattgccggttcatcatctacgactaaaatatttttcatcaagtccaccctttatctacttaattctctgggaataaaataacacctaattcgtgtggcgcatctgcaaagaccgcactctccgtaattcggtactcaccttgcaagtcttgaaccttcaaatgacaataggttggttgactttgaattgcttgataaaaattttcgttatttgaaaccggtaacccattacattcaacaatcacatcaccaaccgtcaattgcattttagcagcgggggttgctgtttgaacccctaaaacccgaacgccttgatacggtttggtgaaatataaccgtttttcacctgcttttagtttacctaaacgccattgtaaaacaaaaccacctaacaatgcaatcatgacggcccagattgcaaactgcggtgcgacgacactgattaggcctaatatgagactcagcacgcccaattggatttggcgtttaaccgaacgttggactaaaacagacattaagacttggaccgctttaaacgaaaagcccaataataacggcaaaatcacaatgctataagtcgtttgtccaatatgtaaaaccggccagaaagtccaatctggtaaattcaaagtccctgggatgagaaagaagacgggggctaaataaacttgccgactggtaaaaattgccgtcaaccggccccgttgactctcaatcacgttgggggtcgtcagtttgccggcgtcttttctttgtaaccaaccggtggcaaaagcaaccaagccgatgacgattaataattcggctaataattgattggtatcggctgattggtattggggccaaatcagtggcaatccccaataaaccaccgcactcaccaataaaattgtcgtggcgtttaagcgatgaccgatacccattaaggcgatgatggcaatgatctgatagactaaccaccattctagattaaccgccactcccaataacagcgtgacacaactaatccctaatcccacaaataaaccatgccctatgaaataacggacttccgaccaccgcggattaatcgccattctgaatacacgtcgttcggcacgcacccgatagcgggccaagccaatcgccatgataatcgtcaaccataacaacggcgatgtgagtaatacccatccaatttcacttagtgtctccataccctctaaacctccaaccggtcatttggtgccatttaagttgctattcttcattagtatagcattttgcccccttaactgcctagtgctcgctgaaatcttcgtattaaaaacaaatagtcttcttcaacacgcgcaataaagacatcaattgctgttcaaatcaaaaaggtggctatcctgagtttttcgggatagccaccttttccggttaactacaaaataccaattatcttaagttcaagataactggtattttttgttaatgctcagttgctaccgcaactcaacacacttcttctttaacgtgcttctgagttagcttcttccgtctagctacaaatcatgaatcatgactgaaatcgtcataatccctgattttaggctatactcagaagctgaccagctcagtcagcacttatattttaaggaatcgacgcattgagatgacagaacctaaggccccaatcacaatcccaatcacagccatcgtcaaatctagttcgaataggaacatccctggtttcaacaacgaatagccggctgaagccatgctgatcgccatatgacggtaaacccaaccgtaaccaatatcgaccactagaatcggaataacgacccctaacaaaccagtccaagccccttccaaaaggaaaggccagcgaatatagctgttagttgccccaaccaagcgcataattccaatttcatcacgtcgtgacaaaatcgtaatccgaatcgtattggagattaagaagactgcgacaaacaataagagaattgtaaaaccaatcccccaacgacgaacaccagacatgacgctaaagagtttcttcgcgttattgccaccataagtcgcatcgtaaacgtgttttaactgtttcgctttcttagcgactttaattgtttgtgttggtttagtcgtgctaaccgtatagacatcgtacaatggattgtcgtcaccggtgaacatcttgaatgattgaccgtaactgccaaccactttatttaattcttttttacgacttgaataggtcacgtctttaacggaagccatcttttcaagtttcttttgcaattgatctttttgttgcgttgtcgtaccacgttcaatcatgacccgcacgtgaacgtcattttcaatatctttagaaatcttattgaagttgaaaatcatggcgaagaaaatcccgaccaataataatgtcactgttacggcactaactgcggcaactgacatccaaccatttcgtcttaaacttttaaaactatcatctaaatggcgcttaattgttctagtcttcatagccatattcaccttctttttcatcacgaactaaacgaccatcttcgattgcaagcacccgatgcgtccgttcattgaccatttgtttattgtgggttgccattaagacaatggtcccttttttgttgatggcttctaagatatccataataccttctgatgtttcgggatctaaattaccggttggttcatcggcaatcaagacttctggccggttgacgatggcgcgagcaacggctacccgttgttgttccccaccagataattcattcggaaaacgtcgaatttcaccctttaggccgaccatttcaagcacttctagaacccgttctttaatttcttgaggttccacttcaattacttccatggcgtaagcaatattttcaaaaaccgttaaacgtggtagtaatttgaaatcttggaaaacgacgcccatcttccgacgaagatagggaacatcacgatccttcatagcaatcaaatcgaaaccggcgacactaatttcaccgctagttgctcttaactgatggtacagcatcttaatgaatgttgatttacccgcaccacttgggccgacaatgtaagtaaattcgccgggttcaatggttactgataaatctttaatcgccgtcacaccgtttgcgtatttctttgacacatgcgtcatttgaatcactgggggacactcctttaatatttgtcaattaatttctactgtggaaatcacaatctattatattatagcatgcttaataaccgaataatcacaatttgattacaattacatgtcaatttctttgcaactaatccggattacgttggctgagttgccattgtaaataagcatccataaatggatctaaatcaccgtccatcaccgcttgcccattacccgtttcataattagtccggtgatctttgaccattgtatagggatggaagacgtacgaacgaatctgtgaaccccaaccaatttcgagttgttcacccttaatcgcggccgctttcttcgcttgttcttcttgttcgcgttgatatagtttagctttcaacatccccatcgccgtttcacggttctgcaattgtgaacgttgcgcctgcgaactgactacaatgccagttggcaaatgggttaaacggacagctgaagaggtcttattaatatgttgaccaccagcaccacttgaacgaaagacgtcgacccgtaaatcttcagtccggacttcgatatcaattgagccatccaattcaggcatcacatcaaccgaacaaaatgacgtatgacggcgacctgctgaatcaaatggtgagattcggactagacggtgtacacctttttcggaacgtaacaaaccgtatgcgttatggcctttaatcatcaacgtgacactcttaataccggcttcttcaccggcttggtaatcttccgtttcgaccgtaaacccgtgtgaatcggcccaacgcagatacatccgtagcaacatggccccccaatcttgggattccgtgccaccagcacccggatgtagttcgacaatcgcattattgccatcatattcgcccgacaataattggccgagttcatactgttgcatctgcgcgttaagcactgcgagatcggcttcaaaactaacttgcatctctgcatccggttcttcttgcaacaactctaaggccacactgaggtcctcgtattgcgcttttaattgattaaatgaatcgtattgcgcttttaacgcgttattttggtcaattacgacttgggctgctttttggtgattccagaaatcaggttctgccatttgtgcttcattttgcgcaatgctttcttgcaggccttctaagtcaaagcgaccccctaaaatgcgtaattttttgttcaatattttctagttggtgtttagcgacacttaattccatttgataagaccccttcacgatttaatgccattaaaaaatggcccagataacgaactaccccggccatttcctaaattagcgacgaatattttggcgaatttcagccttcatgaatagacgtgtcgtatcgtaatcgatactactaatcatctcttcaaacattctgtagccttcttcttgatattcaaccaatgggttcatttgaccgtagccccgtaacccgattgaattacgtaattgatccatggcatcgatatgatcggtccaacgttcatcaactactcgtaaaataaccactttttcaaattctagcatctgatccgtatcagacaattgtttttgtttcgtggcgtaattcttttcagcaaagtccatcaataatgattcaatctctgcggcatctttaccttgtaatttttctaatggtaattgttcttcactgaccatcgaagtcgttgcaaaatcatggacggcttctaatttccagtccaccatttcaccttgggtgtgtaattgcacgattcgtttaacggtccgtgaaatcattggcataatgactgatttcaaatcttcttcagccatgatgacttgcatccgttgtttatagatgacttcacgttgttcacgcatcacatcatcatattgcaaggtttgtttccgggtatcgtagttattcccttcgacccgtttttgagcggcttcgacttggcgggtaatcatactactttggataacggcatcgtcatctgaaatcttcatccgatccaagaatgctttgatacgttctgaaccaaaacgtttcattaaatcatcttcaagtgacatgtagaattgcgtcaccccttggtccccttgacgacctgaacgaccccgcaattgattatcaatccggcgtgattcatgacgttcagtcccaatgacagaaaggccacctaattcaacaacaccaggtcctaatttaatatcggtcccacgacccgccatattggtggcaatcgttacggcaccgcgttgaccggcattcataataatttcagcttctttaaaatggtttttcgcattcaagacagcatggggcacgttattttcatccaataaacgtgacaataattctgacgattcaacggccactgtcccgaccaagattggttggcctttagtgtaacgttctttaatgtcttcaacgactgcattgaacttactttcaagtgttgggtacaacacatctggtttatccaaacgcgcaattggtttattggttggaattgagataacttccatgttgtaaatttcgcggaattcttcttcttcggtcttagccgtcccagtcatcccagaaagtttattgtacattctgaaataattttggtaggtaatgttggccatggttttagtttcatcttgaatctcaacgccttctttggcttcgattgcttgatgtaacccatctgaataacgacggccatccatgacccggcccgtaaattgatcgacgattaagacttcaccgtcttggaccacataatcaatgtctttcaacatgatgaagttggcccgtaatgattcgtccaaatgatgcgttaacgccgtgttttcagtatcgtataagttatctaagccaaagttttcttcggcttttccgataccctcttcagttaaactaattgttttagttggccaatcaatcttataatcggtctcttcttttaaggtcttgacgaaacgatcagcacgcacgtaaagtgcagttgatttttcagcttgtcccgaaataatcaatggtgtccgcgcttcatcaattaaaattgaatcgacttcatcgacgattgcaaagtttaagggacgttgtaccatttcttctttgtaaaccaccatgttatcccgtaaataatcaaacccgagttcactattggttgaatacgtaatatcggaattataagcatcccgtttttcttcagcggttttagcatttaagtttaagccaactgataaaccgagccaattatataattcacccatttcagtcgcatcacgacttgataagtattcattgaccgtgacaacgtgaacccctttaccagccaatgcgtttaaataaacgggcattgtagccgtcaaggttttcccttcacccgttttcatttcggcaatattaccttcgtgtaacgtaatcccaccaataatttgaacgcggaatgggaataagcccaagacacgcttagcgccttcacgagcgaccgcaaaagcctctggtaaaagatcatctaacgtttcgccatttgcaactctggttttaaattcaggtgtttttgcttgcaatgcttcatctgataaattgctgtattcatcttcgtattgttgtaccttatcggcaattttgcccatgcgggtaacttcgcgtttatcgctttctacccatgtttttagaaagtttgccatcgatttataattctcctctagaaatcttaatcagtcatttttaatctaaattatggtgctaatcgtggttcttaacaattcattctaacatttattacaatcaaataaaaccccgtcagagccacaaatggccaacccttcgattaatagttaatattgttgtttatttttaattaagctaaaaaaaacgtttggacaataatcatgtccaaacgtttacgaataaattaattattcgtcagtttcaatcaaaccatagcgtccgtcttgacgcttataaacaatgcttgttccgttggtttctgaatcttcaaagataaagaattgatggcccaacatattcatttgtaatatcgcttcttcactatccattggtttcaatgaaagacgttttgtccgaaccacttgcattgaatcttctggtaaaatttctgcctctgggacaactaattcgatatctttaatgccccgttcacgtgatttacggttaatcttagttttaaatttacgaatctgacgttctagtttatcggtcacaagatcaatactaccgtacatatctgatgaggtttcttcagctcttagtacgagataaggtaatggaatggtgacttcgaccttggcggttttatctgggtagactttcaaattaacatgggcagttgcagtagccgacttgtcgaaatatttctcaagtttgctgattttcttctcgacataattacgaatggcttctgtaacctcgatattttctccacgaacattaaaacttagcatatgacttctcccctttcacaaatatccactgtggatacttgtcctcgactgttaaaaatggccaaggcttttgttactaaactcattatatataatatccggcagacaaacaaataaaacggtttctaacgtgctaatgtaattgattttattggaatcttaagaaaatgagcccgtaaacattgttgtgcgtgccaaagcgtccgccccgtcgtatagatatcgtctaatagcacaatcttacgtggtaattggcattcagtagtcgcttgataatcaaaaaactgggggctcgctaatcgttcggcgcgtgttttttgtgattgtccctgttgcgttggtcgtttagtcaataaagtcgtcaacggaaaacaatcttgatacaaccccaacaccggatcaaaaccgcgctgttcataatgggcacgcgccgtcggtatcgggacgtaccaagtcttagcttgcaccggccattgattttgaatctcactttgcaataagcaccggagttgataatcgccttgtcctttatagcgttggaaatacaaccgcatcgcctcgttataagtaaataaagcctgattttgaaacgtttgctggggatataacgcttgccatttctgacaatctggacaaaccctcgacttaatcagggagcgaccacacccctgacaacgttgtggcccaatccgctcgaaagtccgcaaacaagtttcgcaaataaacggtggataacgacgttgaacgccgattaacatccataagctcggcacttgaataatcggttgttgacacattaaacatcgcattttaatcgccgtcctttttgattttgatgccgaatttgccgacaagcgcgctgaatcgctaacgtgtaatcttgataataaaaataaactggattatcgggatgcgctttttgccgaccagcccgccccgcaatctgaaccagcgtcgccgttttaaaaatacgatgatccgcgcctaacactaagacccccacgttttgaaaggtgaccccgcgttccatgatcgtcgttgtaatcaacacttgaaccgattctgcccgaaatgcggccactttcgcaagtcggtcggggtcttgggcgtggacggttaacagcgcgacgtctggtaaccacgcggtcagtacttgttgaaccggttgtaaatcagccactcgtggcacaaatatcaataaccgctgttgcgctaaacaccgtcgacaatcttgcaaaaaccgtttcggtaaccgttgtcggctcaattgctgctgccaaccgcgtaacggtcgacaattcggttctggcagtaaatagccgtgatagcgtaatggtaattcgctagtcgtcatcgctcctgtttggacggcctgttgaattactttagtgggggtcgcggttaaatatatcaaggctgattgtggcctaaccgcttgcttaaccccggccgctaagactggattatcctgaaacgggaacgcgtcaacctcatcgacaatcaacacatcgaaggcctgataaaagtttaacaactgatgcgtcgtacaaatcaccaaagctgcatccttgtaaggcgccgtttgaccaccatacaataacatgatggtctggtgttcaaaggccgcttgaatccgtggatacagctctaaacacacatcaatccgaggcgcagcaatgcacacccgttgcccattttgcattgctaatgcaattcccggaaacagcatttccgtcttcccggcccccgtgacagccgttaaaacgtgagtttgctgagtttgaatcacgtcacaaatctgttgagccgctttggtttgtaagtcggttaactgccccgtccaagttaacttcgccgttttagccccatttaacgtcactgcttgcgcgggtacgtaaaaaagctggtcgccttcgaccaaacgaccgaaaaccaaacattgccggcaataatggcgaccatctggtaattgcgccgtcgccacttgttgacaccgttggcagactagcaccccgttacggttctcaaacgctggtcggtgtttgagttgtggtaaactataatcagctttaatctgggacagcaactgttctgcccattggcgaccgacgccggttggttgactcgtcatctaatcccccctcaattaacaactaccactttaaattgaattctctcgaggtgtcctatggaaacttattttaccgtcaaaacggacggccaatttgaattaatcgttaaaaaatcacggttcatttgccaagttgctcgcgtgactgacgaaaatagcgcgcaagcttttattgaacaagttcgtaaaagccatcctaaggctaaccacaactgttttgcctatcaactcggccaacaaccacctatccaaaagcaaagcgatgacggcgaacccagtggcactgccggcgtcccaatgcttgaggtcttacgccaaatgcagttgaccaacttagttgtggtggtgacccgttacttcggcggcattaaactcgggactggtgggttaatccgggcatacagtcatgctacgtcaagcgccttaaccgaaatcggcctcgttcaaggtgttgctcagaccgcctgtctcgtcacactcgactattcccaatttgacgccttacaaaattggttggcgcaagtccagttaagcgccactgatattcagtacgcagccgatattcaattgactgtttggctcgatacgactaaactcgattggtttaaagccgcgattacggaacaattaaacggtcgcctgactttcgttgaaggaccggaacagtttaacgaagtcccaatcagtcctcaagacctacatgcattaaccaaataaaaaaggagtagccgtggctactcctttttttgtgattcttttttaggttttaataatcgttttaacaaatgcagtaatggctggcggttatcgccgactaacccgattgattccacgaacagctctaagccgaacaagacggcgaccgtcaaagcgacgctcccccacaatgttgataatgggtagagtaacgaaatcaatgagaaaactaacgccaaaccataaatcactaagacggtttgtcgatgtgacaaaccgagttgcatcaaccggtgatgcaaatggtgtttatcggcttgtgagattggttttttatttaaaattcgccgtaacatcgcatagacggtatccgtaatcggcacccctaagataatcactggaattaataaggtcacaaacgttacattttttaaccctttaagtgataataccgcgatcatgaacccgataaacaacgcgccagtatcgcccaaaaagattttagcaggatggaaattgtgtggtagaaacccgattaaagccgctgccaaacagaaaatcatgattgaaacgctgacgttggtaatcgctaagaagaaataagcaatcacgcccatcgtaaacaacgcgatgattgaaacgcccgtggctaacccatcgagaccatcaatcagattgactgcattggtaatcgccaaaatccaaaagacggtgattggaaaactaagccaaccaagttcaaacgtcccgactaacggaatcgttaaaatattcattcgaataccggctaagaaataaaccactaacgccgcaattaaaatcccgagcattttttgcttaggacttaattctttaatatcatcaatcatcccggtaatgataatcacgcattccgccaaaaaaagactgaataattcatgcgttggaaattgaccacgcaataggacgaaggtcccaaaggtaaaggcgataaaaatagctaaaccgcccattgatggcatggcttttttattgacccggcgtgcgttcggcttatcaacagcccctaatacaaacgctaaccggcggactagtggtgtgatggcagctgaaactaacatcgttgcaaataaccccactataattttaaacatggtcatcattcaaattgcccactttctctaactaacattctctatattatacaaatcaaacggcgcaaacacaatacagacttcgtagcttaaataaaaccaaagaaaaacactaaccgaattcaacagaatcagttagtgttttaacgattatttggcgtattctattgtacgcgtttcacgaataaccgtcaccttaatgtgtcctggatattcaagttgattttcaatttgattcttaacgtcccgtgctaagaccgttgcctgatcgtcagtgacttgttctggtttgacaatcacacgcacttctcggcccgcttgaattgcaaaactatggtcaacgccgtcaaaactattggtaatgctttctagtttttctagacgatgaatataattttcaagtgattctgaacgtgcccctggtcgagcagctgaaattgcatcagcggccgcaaccaagacagagataattgaagtagcttcaatatcaccatgatgggacccaatggcattgattaccgttgctggttctttgtagcgggttgctaattcaaccccgatttcaacgtgggaaccatcaacttcatgatccaacgctttaccaatatcatgtaataaacctgctcgcttagcaagcgtcacatcttcgcctaattcggccgctaaaatacccgttaacttagcgacttcaatcgaatggttcaagacattttgaccataacttgttctgaaatgtaaacgacctaagaccttaatcaggtcagggtgcatcgtatgaatcccaacatcaaaaatagcttgttccccgatttgacgaatttgttcatccatctctttacgtgacttatcaaccatctcttcaattcgtgccggatgaatccgaccatcttgaattaatttctccaacgtcatccgtgcaatttcacgtctgattggatcaaagccacttaaaacaaccgcttcaggggtatcatcaataattaaatcaatcccagtcaacgtttcaagcgtccggatatttcggccttcacgcccaataatccgacccttcatatcgtcatttggcaacgtcacaaccgtgaccgttgtctcggtaaccatatcggccgcactccgttgaatcgcttctgctactaacgttttcgctgttcggtcagcattgcgcttagcggactcttcactttccttaattaagacggctctttcatgttctaaatcttgttttgtatcatctagaataatcttttgcgcgtcatcatgagaaagttctgcgatctcttgcagttttgcttgttgttgctcgattaaagctgagatttctgcttgcttttcagttaattgttgggtctgattagccaatcgactttcgcgttgttccaatgaacgttcttttttatctaacgttacatctttgcgatccatcgtttcttctctttgcatcaaacgattttcttgtttttggacttcaccacgccgatctttcaattcagcttcaatttctgaacggtagcgatgattttcgtccttcgcttctaaaagaatttctttcttccgcgttgccgcttctttttcggctgcttcaattattcctgtggcagtcttatttgaaccatcaatttcacgtttgtatgccttcttttgcagaacggaaccaaccagtaaaccaacgattaacatgatgactgcgaggattaatgaaatacctaagatcattttctcacctccgcatcatcaaaaattttgaattgcagtgttagctgcaaatttttaaggatgttattatgttttagtttatcaacacatagttattttatagtttcgtaaaccgcctgtcaacttaaactatcagctttaaaaccgctttctcatttaaagcgacccactttatcctattaattaaataaatcactagccgatttcaacaaaaaaagccagcttgtcccaaaaacgggcgttgctggcaatcctgttaaattcagaattaatctaactgctctttagacatcaagttttgtttcatctttgacttcaggggcatcttcatccggcataccataggctgcacggactttcaggcgaatttcgtcttgaatttctggatgatccgtcaaatatttcttcgcgttttcacgcccttgaccaatccgttcttcaccgtaagaataccaagaaccactcttatcgataatatccttttcagcggccatgtcgacaatttcaccagtttgtgaaatcccgtgaccgtacataatatcaacttcagcaaccttaaatggtggggccaccttgttcttaacaaccttaatccgagcccggttcccgatcatttcggtgccgtttttaatcgtttcggcacgccgcacttctagtcgaacggttgaataaaacttcaacgcacgtccacctggtgtgatttcggggttaccaaacataacgccgactttttcacggatttgattaataaataacgcaatggttttggtcttattaatcgtccctgatagtttacgtagcgcttgtgacattaaacgggcttgcaaaccgacatgggcatcacccatttcgccttcaatttcagcccgtggtactaaagcggccactgaatcgaccactaaaatatcaacagccccacttgagactaatgcgtcagcaatttctaacccttgttcacccgtatccggttgtgataaaagtaattcatcaatgttaacgcccaatgctgtcgcgtatttaggatccatcgcattttcagcatcgatataggcggccgtgccaccttgtcgttggacttcagcgactgcgtgtaaggcaaccgtcgttttacctgaactttcagggccgtaaatttcaacaattcggcctcgtggataaccacctaccccgagtgcttcatccaatgctaatgaaccagaagaaacggttgaaatctgggtatcaaccttttcgcccatccgcataatggaacctttaccgaaattcttttcaatcttttttaacgcagcatccaaggctgcttgtcgatcatctttagtcaatttaagtgaccctccttaaaagagttcatttcattacctctttagtttacagacttaagcgtcaaattgcaagcacaaatcgaacaaacgttctcaatcttttccccgctcatattaagatacccaaccgacacttatttttttgagctacatcaaattattgccaaaataaaatagcgaaccatgactgggaatcgtcatagttcgctatttttattaatgctcagttgctgaccgcaactggtagcactctattgtttgaatgagtctgcgaagactgttctgtttttccagaaataatcgacacctgaatagatggtgaagaataagcagacgtataacatgatttgcgccaatggtaaaccgatattggcgaagaagacgttgtttagcaacaacaagataatggctaacatctgtgtcgttgttttgattttaccaggcattgctgcggccatcacttcgccgccttgactcaacaataaccgtaacccagtcaccgctaattcgcgccaaataatgatggcaacgacccaagcgggtgcttggcctaacgtcactaagaaaataaacgcagtcatgaccaatagtttgtcggctaatggatcagcaaacttcccaaagttagtcactaaatgctgtgaccgcgcaattttaccatccaataaatcggtcaaagaggcaatgataaaaataacagtcgcaatgattgagctgactgcaatctcagtacccgcaactgagaccatactacttggtaagttaaacgctaatataattgtaaaaaccggaattaaaataatccggaacatcgttaatttattcggtaaattcataacaaaaagacctccaaaggttaattactacttcgctaatgttgctgtaaaactaatcgtccgtacaaaagtggtttcgttattaggacttaaattaatttcagtatcattaatcttcatcttagtagcaggtgcattcccagtttggattgaaaaggcggtcgttccagctggtaattccgttgattggctcgcgccaaccgcaactgatccttgccaaattgttgacccattaaccgttaaactgacccacgctgctgaattttcggcagagaacgttagtgtgttggctttattaggtaaatttttaacggcaaaggcttgttgtgaaccactaatactggtcattgaagcggataatttttgtgattttgcttttttagccgctttttcactcgcctttttcgctttagtactttcactcgctgctttcttgctgctatcgtttttagcggttgaagttgagctgctgctatcttgatcctttgtatcagccttatcacctgaaacagtcactgaagaactcgattcattcaatggttgtttatccgtcccccggtggctcaaagcaatcccgtaaacaatcccgataatcacaatcacaactgcgacaatcgaaatttgtggcaccatattacgccatttcgaccatttagaatcagtcgtctcacgcgttaaacgtgtttgattttcaactgatttttcaacgtattcttctggttttgtattgggtaaggtatcttgatattccgctaataaagcttcgctatcaaggccaaccgtttgggcgtattgtttgataaacgcacgcacgtaaaagctgccaggtaaggcatcaaaattaccctcttcaatcgcgattaaataacgcttttgaatcttagtaatttgttgtaaatcatccagcgtataacctttttcaattcgtgcttcacgtaatttttgaccaatttcattcatattaatccacccactattatcccattatcattattcaatattatagcatattgcccctatcggcaatctttaagatttgtttattttaaccaaccaccgttaacgtataacgtctgacccgttaagtaatccgcttcaggcgccaacaaactctggacccaatacgcaatctggtccgtcgtcgcaaaagccccgttaggaatatccgcggcaattgcttgttgttcttccggcgtaaattgttggttcattttggtcgcaactgcgccaggcgcaaccacgttgaccgtcatccctaacgtgccgacttcttgagcgtaggcgttcacaaaggccgactgcgcccctttaaccgtgctataagggacttccatcgcgctcccccgaccgccatagattgaaccaataaagacaatccgacctaaatcactttgggccaatttcgtctgtaactgttgcaaaatttgaattggcgtctgaacgtggaccaaccacaagcgattaatcgcttcaaccggaatttcatccaataaaccgtaagtcgtcatccccgccgcaaaaatcaccgcgtccacttggaataactggtcaatcgctgctcggatcaccgctggttccgccgttaaatctaattgacacgtcaaaaaatcctgttgtggatattcttgactcagttgttgttgaagttggccaatccgttcaccattttgataataatgtaagtatagtgaccaacccgctttagccaaccgttgggcacatcgcatcccgatatcacctgaagcaccaatcaccaaggctgaatgtctcattaagcttgttcctccggtaaaatatggcaaaccgtcatggcttcaatcttaaagaaatcggccgcgacttgtgccaaatcggctagcgtcacctgttcaatcaaaccaagcacatcaaacggactaacctcgttaaagaattcatcactgtactgattcgcaattgcttctagtgaattaaaggcttgtaagtattcgcccaacgccgcttttttgaccaacgccaaattagcttccgtaaagtcggggctgtcttgataatgttctaaaatcgcaatcaattgatccgataggcctttaggatcgtccgtatcgccacctaaagtcacaaaattaaaggaacgttgaatcgcgtattcataaccgaagctatcgtccaataatccctgttcatagaggcgttgaacctgggttgatgaatcgccaaatagaacttccaataataagttcatctttaacttagcgaccaatccagcttcacccgttccaaagtcggttaagcctttgacaccaaccatgctcttgctacgaaccactggcatcgtcatcgaacgatatggaatgatatcactaccatcttctgcttcagccggcaatgaccggacaatcggttggggctggtcaaactgtttcgccgcttgattagcactcacccaatcgagaacttcttgcggatcatcgatttgaccgacaataaacaagctcatattactaggttggtagaatgttttttgggcttgatacaagtcatccgccgtaattttagcgatactatcgactgttccggcgatatcaatccgcaccggatgttgtgggtataaattaccaacaaccgtataaaataaacgccaatcaggttcatcattatacatttggatttcttgaccaataatccctttttccttattaaccgttgccggtgtaaaatacggttcttggacaaaatccaataagatttctaaattagcctgtaaatgactcgttgttgaaaatagatagctggtccgcgtaaaactcgtgaaggcgttggcactcgcaccgtaaattccgaatttttcaaaagcatcatattccgctttttcgaataatttatgttctaagaaatgggcgattccgtccggtaacgtcacatattcattttcaccaatcggcataaacgtattatcaatcgatccataattagtcgtcaagatggcatacgttttatgataaccacttttagggtatagcttaaccgttaatccgttgtctaatgtttcttcatagagcgtctcacctaagcggggattttgtctaagcttcatttgtatcgacccctttcaggaagtaaattgcttgtaaccgcatgttcgcagcttgttcttgaacggcttgtttcgtgaccgctaaaacttggttggtaaattgatccgcgtctatttcggtttcaggcacaaatagttgattcagttgttgttgacccaaataagccgcgctatctaaacttgatttaaattggttaattaaggctaattttgtttgttcaaagacagcttgttcaaactgaccctcgataatggcttggcgttgttcttcaataatcgccaatacccggtctttttgttgactttcaatcccggtttggaccgtaatcacaccccgaaaaggatctaagccactcgatgcataataggccaagctcgctttttcgcgaacattggtaaatagcaatgacaacggtgtgccaccaaataaggcgttggtgactaacatcgcgtaataattctgttgataaaaataagtgggaatttgataggctaaattcaacttgccctgttggaccggttgttcatcagtcgcttcacgaaccgttgcactcaacggttgttgataaaaaatagcgggtagttggctgtcacggggcacaaacgttaattgcgccaaatcagcgtgggctttatcttcatcaatattgcctaccaaggtcatttggacgcgatcattgtttaacatcgcctgatacgtttcgtataaatccgtcgcagtgacggccgctaaatccgttgcatccccgaaattaggggtttgttgcgtctcatccgtgaaatataagtcgcgtaatgccagcgacgccatcgtctgtttatcatcagcaatgctggcaatatagcgggccatgttttctttttcccgttcaaaaacgacggggttaaactgttgggccaccaaatccggcttaaataataaccgaccgatgaacgcaatcgcctgttgttgtaagtcttgagggtcacgtagatattgtgggctcacaatgcgcattgagacgttaaaaatggctaactggccttgtcggtaagcgttcatgttaaaaccagccccatacatcgcttgtaactcatttgcgattgcgacttgatcccgataatcctgactactggccgataagacactcgccaaaagtgagcgtttagttaagcccactttagtcgctggtgcgataaattgaattgataatcgaattgttttaaattgttgggtttgtaagatatttaaataaacaccatctgttattttttgattcatcatgacgctcctcaccggtttaacagctaaaataccgtttttaaatcccggctattttaatcgtaatcacacgcattctatcataccaaaaaaataaggtaaactcaaaaagccagatagtgctgcccgagtgactgacaacacaatctgacttctaatcaatgattgattcaatttattctggtggattttcatcttctggcgcactttggactaatactttacgtggtttgctaccttctgatgggccaataatcccacggccctccagttcatcgaccagacgcgcggcccgattataaccgattctaaagcggcgttgcagcatcgagacactcgccgtttgttgttgcaccactagatcgaccgcgtcttgatagtattcatcttcgggtgcttcacttggtccctgttcttcagcagtcgtcggaatcatctcttcatcgtattccgctgtttgttgggctttgataaaggacacaatgctttcaacgtcttgactcgaaataaaggcaccttggacccgggttggtttgctgaccccgattggcatgtacaacatatcgccccgacccaatagtttttcagccccactactgtctaaaatagtacgcgaatcaatcccactcgacacggcaaaagcaatccgcgatggaatattggctttaattaaaccggtaatgacatcgacggaaggccgttgagtcgcgacaatcatgtgaatcccggcagcccgcgccatttgtgcgagtcgaataatcgcgctttcgacttcgttactggcgaccatcatcaaatcagataattcatcgacaatcacaacgatgtatggtaacggtgtgcctttaatctcgccgtcttcattgtgaccttgaatatattgattatattccaccatattccgctgaccggtatcggcgaataattggtagcgtcgttccatttctttgacgactttgtttaacgcgttagccgcttttttagcattggtgaccaccggaatcaataaatgcggcacgccattgtagacgtttaattcaaccattttaggatcaatcaacatcaatttaacttcgtgcggtttagccgtcattaagatactcgtaataatcccgttgattgcgactgatttcccactaccggttgaaccggcaattaacaaatgcggcatcttcgacaaatcagacatgatgactttaccggagatatctttccccaatggcacggctaacggtttacccggatgagggggttcttgttcaatcatttcacggaaggaaacggttgagaccgtcttgttcggcacttcaatcccgacatacggtttgcccggaatcggtgcttcaatccggatgtccttggccgcaagtgcgagtgccaagtcatccgctaaattaacaatctttgacactttaacgccgactgcgggttgaatttcatatttcgtcacggctggccctagactggcgcttttaaccaccacatcgacgccaaaggaatcaaacgtttgtttgagcacttgttgattcttttcaatcgtctgatattcttcactttgatcagactgcggaatctgggttaacaattctggtgtcggtaattcataatcatcatccgttgcattctgactcgccaattcggccatatctggtacttgttcttcggtctcagtctcagctttggctgctttagttacttcagccgtccgactcgcaattggtttaggcagttgtttaggcccattaatcgtaaagccttcatccggcaccttgaccttcggcggcgttgcgaccggtgctttaggggtctgcttaatggctggttcaccggaatcttcgtccgtttgggcttgtgcttgttcttttagagcggccagttgttgacgactcttatccgaaacgtgttggaaaccgcgtttggtataaccgccgactttcagaattccttgaatgaaatgctgacagctcttaatcaccacactaaatgagatgtccagaaagataaagacgccgacaatcatcactaaaacggcaatgatgtaggtccctaattgcgcaaacagaaaatgggcaccgctgtataacgtcgcgccaactatgccaccaccgacatccgtggtaacggccatcttctgaaaatcttcaaataattgttgccaggtcgccgacataaaatgattattaatcgcttgttgatgcagtacaaacgcggataaccaaatcaaaacaccgacataggccacgctaaaaccaagcgttttacgttgaaataatggcggttgtttgccgtaaatcattaggtaaaaaccaagtagggcaaaaagaatcgcacctagcacgtaggtgtctccaataaataagcggaaaacattcgcaaataaagccccgataaaccctaattttaaaccagcaaaaaggctaattaaaataaagataaagccgataatatttacggtgtagtcaacggtcgcttgtttctttttcgttgtttttgcacgtggtttacttttttttcgttgagttgccataaaatctccttcaaaactgtctgaccttcattatacacgaacttttgttccgggtgaccgtcatttaactaaaaagtctggcttaataaataaacgcctaatcccaacaacggattaagcgtctataacgtttaaacggtgactaacccgcttgactagtcttcagttaatgcggcggtaaattgtaattggacgccacggtttaatgcgaccgtcgtgacttgataagtcaaagtttcgatgtattcaattaatggtcgtgataattttttaagttctttttgatcaatttcttccggtttaccgaagaaatctaatagttgaacgactcgggatatctgaccagagacggcaaaaccactcttttcaggcaccacttggaaaggcgtcacaatttgataaatattgccagctgctaaatcagcttcttgcaaatattgatcatccgcttcaatcgccaataagctgacttgaatattttgttggggttcggtttctaacgcaacgcggtcaaaatgaaacgcatcaacgctgatggggtcttttttagtttgcatcataattctccctattttaatttatcgtgatcgtataaatgactcttttctaaacctgggaaatcttgttggcgtaacgcatcaaaaatcactaatgccgcacaattcgataagttcaacgcccgaatattttcggacattggaatgcgcaaacatttatcctcattatcgcgcataaacgtttcaggcaagccggttgtttccttgccgaacatgaaataatgatcaacactcgtgtcggtcacatcccgatccgaataagcttccttggcgaatttcgtaattaaatagaggtattgttgatctggaacggtggctaaaaaggcttctaaatttttatgataatgaatgttgaccttgtcccaataatcgagtccggcccgtttcagatgtttatcatccgtttcaaaacctaaaggttcaattaaatccaagaccgtattggtaccggcacaagtccgggcgatgtttcccgtattagcggggattagtggttcgtataatacaatatgattagtcacaattttacttcccttaaaaaagattcagtagcttaagtatacaacatttacgatcaaagctctactgttgcttgaaccataaaaaaacgtagctcctcggttattcacggcgagaaactacgttagtgtcatttcatcactagcttttatcaaaaataattctgataaaagttagggaaaaaattccttgcatttattataacgccctttatttggacttgcaatcagatttattaaaattactttaatttctcattgtttccccactaaaatcgtgacatccaacgaaatctctggtaattgagtcaacctaatcgccgctaattgggcttttgtcgccgtccaagtcagtggggtcatcgccaataaatccgttaaagtcgtttcagttaacgtcatcgtttgttgaacttgataggcctcaaacgtctcaaagtgttgttcaaataacgtcaacaccggaccgtggtcatagctttctttagcttggccttggtataataattcacgtaactcgtgtagataccctgcattcggaatgactttaattagttggccaccgggtttcaacacccgtttaaattcttgatattgcgaaggtgaaaagatatttaacaccgtatccaactgctgatcagcaaatggcattcgcgctaaatcggcgacacaaaaccaaccgtctgtattataatcactcgctaattggatggccggtttcgagatatcaaaaccgatatagtccgctgcgacttgttgattcaattgttgaatcggtgttccttcgccacagccgacatccaaaatcagactgtcaggcgttaaatgttgcgcaattgctgttaaaaatggttggaagaaaccggcttgcaaaaaagcgcgccggtgttctagcatttccttcgtgtattcagatttcatttgtttttgtaggaaataaagggtgccgttcttcgctagatcaaaactgtggccactctggcacgttaaactgttccccgccaacgtcactaatgccgcctgacaaagggggcattgcagtgctgctagatgctgttgtagaaattgttttgctaattcaatttttttcaaattctaattctcctgacctgctactttacattctaagaatattcagtagacttaacattagataatttttttaaaggaagtgacatgatgtttacaacttaccggtttgatgaaaccaaacaaaaaatcgctaaattcgacaaagttcaaccgaatagctggattaacgtaatcgatccaacccccattgaaattgaatcgttaactaagaaactacacttaccagccgattttatttattacagtttagatgccgatgaaagtgcccgtgtggaacacgatcccgactacaacgcgacactcattatttttgatatgccgaacttggaaaaagatcaacaacatcccgataaattccgttacaaaacgagtcctctaggcattattgtaacagattctgtgattctgaccatcaataaaacgccggttaattttttgcagagttttgtcgacaatcaaattaaacattttaatccccaaaaccaacgccggagcgtcttacaaattatgtaccggatttccaccatctatctgcaatacttacgcgacatcaaccgttcccgcgaacgaattgaagctcggttgcaaaattcactgcgcaatgaagaacttttcgatttaatggccattcaacggggcttagtttattttatgatgtcgcttaaaaccgacaaaatggtcttagccacgttggtccgcacgaactttttgaaactgactgaagatgaattggatttactcgatgacatccaaatcgaaaatcaacaagccatcgaaatggccgagatttcgaattcaatcatcaatgaaacagccgatacctattcgtccattattaataataacatgaatggcgtcatgaagtttctcgcatcgtattccattattctgaccatccccggtctcgtctttagtttctacggaatgaacgtcgccctccccttagctgattttaaactaagttgggtggttaccatcatcatttcactgattgttgcagcgggactcatctaccgcttctggcgcaaacgctacttctaatattacgaaagcctattttaatcgagatatcggttaaaatgggctttttaagttgactttcccttcgaatcccgttaatatacgtaatgtacgaatttattcgtatgattaaaaataaatgttcgtgtttaaggagaatttcaatggacgtatttgattatgaagatgtgcaacttattcctaataagtgtatcgttaaaagccgcagtgagattgataccacggtccgcttcggcaatgaaacgttcaaaattccggttgtccctgctaatatgcaaacgattatcgatgaaccactagccctttggttagctgaaaaccactatttctacgtcatgcaccgtttccaacccgagaagcgggtcgcttttattgaaaaaatgcatgctaaaaacttatttgcatcaatcagcgtcggtgttaagaccgatgaatttgattttatcaaccaactcgccgaacaaaatctgattcctgaatacattaccatcgatatcgcccacggccattctcaagtcgtcatcgatatgattcaacacatcaaaaagaccttgccaaagagtttcgtgattgcgggcaacgttgggactcctgaagcggtccgtgatttagaacgcgcgggtgccgatgcgactaaagttgggattggtcccggtaaagtctgcatcactaaaattaaaaccggttttgggaccggtggttggcaactaggcgcactgcgttggtgtgccaaagccgcgactaaaccgattattgctgatggtggcattcggaccaacggcgacatcgccaaatcaattcgctttggtgctagcatggtcatgattggttccctatttgccggtcataccgaatcccctggtcaattagtcgaagaagatggccaacaatataaagaatactttggctccgcctctgaatttcaaaaaggcacacaccaaaacgtcgaaggcaaacggattttagccccttataaaggcgcgattagtgacacactaactgaaatgcgccaagatctccagtcatcgatttcttacgccggtggcaaacgactctcctcactacgcaaagtcgattacgtgttagtccgtcattccatttttaatggcgacgtcctttagttccgccaagctgtgacaaaactcggttatcaattgagtatcaagttgaaaaatgtggttatcccgaactaaggataaccacattttttgatttgaacggaaatagatgagttctggcgcgcgtcaaagaaactccttagtttaatatcaaaatactaagacttatatcacatccccttttgtttgaccttaatcgccttgaaaccagcatcataatagttaggtacctaaaaactttttgtaaactattgaaacgataattaaataacggtataatgacccgtgtcgtcgatatttggcgtctacattgatcagaaaagagtgtgaaacaaatggaaattaaacatacacttggcgataacagtgttatcttccgtgatgcgacttacattaggagaacggtatttgtccgagaacaaaatatgccggagacccaagaaattgatgcacacgaagatcacacaattcactatgtaggttacctcgaacaagaccccgccgttacggcccgggtccacgtcttaaaagatggtggttttagaattcaacgtgttgccaccattaaagccttccgtggccaaggattaggttttcaactgattgaagccattatcgaagacgccaaacggacgaataccccttatatcctgttattcgcgcaagaccacgccatcggtttttatgaaaaactgggcttcacggtcatcagcgaaggcgaaatggaagccaacattccgcaccactatatgaaattaacctttagccaaacagaacaattagcgcaataaaaaatagcttggaccccatcacgggttcaagctatttttttgattaatcattatataatcctgaaacggttctaaaccagtcgaataaatgactgactaaaattttaataatcgcatagactggaatgcctaaaataaccccggctaaaccgaataacttacccgatgctaacaatacaataatcgtcgtgaccggatacattgccatcttgctgccaagtaccaaaggcgaaaccaagcggccttccaatgtctgttcaatcgcaaagacgattaaaactttgactaacatcaacggtgaaataaacaaggcaataatcacggacgggaccatcgctaaaaatgagcctagataaggaatcaaatttaaaatcccagctaaaataccaagcgttaacgcgtatttcatcccaacaatccaatagcccgccgtaaacatgattgccacccaaaaggcgaccgtcaattgcccacgaatatactgactgacttgaccattgatttcatgcaacacttggccggtcgttgcacggactcgattcgggaaaaagtgcgttaagtacgcttttaatcggtgaccatcttttaacatgaaaaaaagaataaacggcatcgtgacaatcgcaatcacgatgttggtgactacgccaactgccgtcccgatatggctgaccgttgaactgaccatcttattcaatttatccgacaaactgcctaaaacatcagtattaatgtcatttaactgtttttgaatcgatttaaaactaggatcgttaaaccattgcatcgtctgtttctgaatattctgccaataatccggccaatatttaatcaaactggttgtttgcgattgaatcaccggaattaaagtcgcaatcccccaggcaatcaaaccaataatcgcaatgaatagtatcgtgatggctaacacgcgatttaaatgccatttattttccaaccaatcgatcagcggattggttaaataatacaagaccgccgcaataatcacgggtaacccgataatcgttaacaatgattgaatcggttgcaatagccacgctaatttggtcatcaataatattatcagtagcgtcaataaaacatttaacaaaacaactggcaacttcttatttaaaaaccatttaaaaaaccacgactgtttcgtttcgtttaattctctctgtgccatcaatcacacctaattcctattcattaatttgataactcaattgcgtgcccactttaaaagtgggcatctttggtgtttcggatgtcataggtgctaaatagaggccgccctgcaatcgatcaccgtctgggacttgatcaaaaaccaaagtgacgtgcccgatagtattcagattttcattggtcaatgccccaatgtaagtcgcctgatagacgtgttgatcaatcgtcacggttgcgccagtggttaagttaaacaccggatgcaagtctgcgaactgctgaattaaagcaatttctttaagtgcgggtgtcgcctgttcattaaatagaatcaccattggttctgtggaatcaatggcattagccccgatggctttaatttctgcttgaattttcataatggcgcctctttcacttaatatattgttattgtagcatattcctacatcagactcagcttttgctaattaatcctatcaataaattaaaccgttttcgcatgaatatgctatactcagatagtaattgatgaaaggggtctaataatgacagaaaaagtacttatcgggggttacacccgtcgaattggcaagggtatctatcaaggtattttagatcaaactgcccatgcaatcagcaacattcaaccattgattaatattgaaaatccaacttacttagcgatttcaaaacgcaatatcctttatacggtgattaaagaaggcaatcaaggcggaattgccgcctttgatttaacaacaccgacacccaatcgtttgaacgtcatcttagcagccggtgcaccacccgcatacgtggccattgatgaagaccgtcaattagtctatgccgctaattatcataaaggccaaatcctagtttatcaaatactagcagacggtcaattaaagcttgctagtacgacgacccataccggtcatggtcccaaaccagaacaaacgagtgcgcacgttcactataccgatttaacaccagatggtcgcttggtcgtttgtgatttaggcatcgatcaactggtgacttacgatgtcgatgctgctggtcaattaaccaaagtggcgacttatcatagtgcccctggttttggcacgcgtcatcttgttttccatccaacgcaaccaattgcctatttacttggcgaattagccagtgaaatcacggtgcttgattatcaagcttcaaccgggaccttcaccgcgcgtgacacttatgccatgttacctagcgattggcacgcagctaacgggggcgccgccattcggatctccgcagatggtcgtttcctatacgcttccaaccgcggtcataattcaatcgtcgtctatgctattgaatcggctggtcaaaccttaaaagtgattcaacacatttcaactgaaggggatttcccccgcgatttcaatctcaatgcggatcaatcgctcctattagccgttaatcagaacagtgacaatggtaccctttaccaacgagatgctcaaactggtttattaacgctttgtgaaaaagacctgagcactcctgaaggtgtttgtgtcctattccaaaattaaatgtttatcctgagttttcaggataaacacctttttttggttatccagccggttgaacttggctggtttcgagttggctaatgatttgttgaacgatcgctttaaatgctggactatgccgatctcgtggacgcggtagattaatcggaatttcttggagcaattgttgttggccgacaatcacgattttagaagcgagcgcaacggcttcttcaatatcatgggtcactaatagggcggttaattgttgggtttgccacaggttttcaatgagttgttgcattgattgtcgggtgaaagcgtctaaggcgccaaacggttcgtcaagcaatagtagctcgggatggtgtaataagatacgtgctaaggcaacacgttgttgctggccgccagagagggttagcgggtattgatgttgattggccgtcagatcgacttgcgttaaggtggttgctaattgttcagcggtgattttagcctggccaatactgagattttgtgcgacggttttccaagggagcaaccgaggattttggaacatgattcgggtcatggcgttggtggttgtgacgcgctgctggttttgccagatgctgcctgaactaggggcacttaaaccggcgatcatccgcagtaatgtacttttaccagcaccacttttcccgataacggcgataaagtcgttttgctgaatggtcaaatcaatcggatttagaatggtttggccgttgaattttttggtaactgcttttaattccagaactgtttgcattttaaaaccacctttattcattaatttgccagtgattggcttcattttcgaaaaacttagcaattaaatctgatattttaccgagtaacgcataaatcaaaatgctgacgagaatcacatccatctgcatgaattcacgggcgttcatcgccatatagccgataccagaatccgaagcgatcgtttcggcgacgattagtgtcgtccacataatgccgagcgcgtaacgtagcccgactaggatggccggcagcgcactcggaaagataatatcggtgaagagttgccaacgactcaactggtaaacgtggcccatttcaatcaattctggatcaacgctttgaatcccgtgtaccgtgttggcgtacaggggaaagaagacgccaacggccactagaaaaatcttactggtttcgcccaccccgaaccaggcgatgacgagcgggagtaatgcgagatgcgggatgttgcggatcatttggatggtcgaatcgagtaattggttggcacggtgggagaggccggtcagtaacccgagtagtaagcctagactggcaccaatgccgagacctaaagtggcacggtaaagactgatagtgacgtttttgaagagttcctggccctgtaccaaggtgtaagctgttttgatgatagtcgaaggggccgggaaaaacttagtggaaattaaattgaactgactcgcgacttgccaaatcagtagtaaactgacgggcagtaatgccggtaaacagaaattgaggagcttagttttgaacttttgcatgacacacctactgactattaattttcgattttagcggattgaacatcaactttctttttgattaattttaaatcgtagaaagtatcggcgatggattgttgttctttcaaaatttcggtggagattgattctagcccgtaagtccggcggttgaccatcaaggtaatcgtcgcttgatccatcttcaacgctttagcgagatttttaatcaattggcttttattttgattggcgcgtttgagggccttattggtctgactgacgactagtttagtcacgtcaggattagcggttgtaaaggatttagtggataaaatgaaatcacgatcggtcgtataaccttcggcggtcgttaggatttgcgcgccgatatcagtttgtgccgaagcggtataggggtcccatgtgacccaagcagcaacggagcccttttcaaaggcaatccgggcggcaccagcgtctagatattgaacatcaacatcgttcaaagtcaggccagcttttttgagggctctgattaagaagtaatgagcgctagtgcctttcgcaactgcaatcttttggcctttcaaggctttgactgatttaacggtactatttttaggaatcaggattgcactaccttggtatttagaataaccggcagcggcatagacgatttgcgcgccactgctttgcgcaatcaccggtggcgtgttaccagtccgaccgaagtcaattgaaccggttttaagcgcttcttgtaaggcgctaccgtcgacgaattcatgccatttaacggtgtagttttccttttccaacgctttttcaagaccaccatcgagtttggcaatctggaaaatatcgcctttttgatagccaatcgtaatcacggttttggcttcggctgtttgattaccgtagagatagtggtagccaaaggcggcgccgattaaccagatgctacagaaaagtgcgacggccagttttttaaaccaatgtgttttagccataatgggccacctcctgtaaattaaaatcagttaattgatgccgtttaactttgccggtcggaccactgggcaaggcttggacgaaatgaatgatttcgggctgtttaaaccgggagaggttgtgttggcaatgttcgataatggcttggtgatacgcttcgagttgttgtgcatcggttgagtgattggtgaggataatgtaagcactgacgcgttcgccgagaatcggatccggttggccagtcacacaaacttgttcaacgaagggtaatgctaataaaatattctcgacttctgtggggcttaatttttcacccccgcgattgatcacgtctttttgccgaccgttgatgaagacgtaaccttcggaatcctgataaccgaggtcgccggttatcagccaaccttgatcgaagtcggtgtttcctaaactgttttgataggccgtaatcacgttagccccacgaatggcgatttcacccatttggttggcgggtaaggttgaatgatcggctgcgacaatttttaaatcaagaccaaggggtacgccaacggagcctaacttacggtgttggagtggattggcgcaaatttggctggcagcttcggtcatgccgtaggattcgattaacggtacttgaaaggtcttttcaaattgacgtgccgtcgtaatggcgagtggggctgaagctgatcgaatgaagcgcaagtgatgattgattgcgtactggggggcttttttgagtaagatgttgatgatggttggggctaatgagacccacgtgatttgcgcggtttgaaccgtggcccagaattggctggcactgaatttaggggcaatcactagttgtccgccggaaaccgtcgtggccaataaggaaatgacttgggcgttaatgtgaaagagcggtaaacagagataggtgcgatccgcggcggtcaattgatggcccgcgatgatgttttgaatagctgccaatagttgagcgtgggttaagccaactgctttgggggtcccagtcgtgcctgacgtatacatataaatcgctaacgaattttcggtcggcacgcaattagtgggttggtgatggttaattgattgacgttgccagtaatgactagtcgctaattcaggattgatactcaatcgtaggtggggttcgggggtactaaaatgagtgtcgtcggcgaaaataacggcagcgtaagtttgtttggctaagagttggtgcgcttcgttattgggaatttgggggtcaacggcggtaatcgttaaacccgtgattaaggcggcgagataagtaatgtagaattggtaagaattgggcaagcctaacatgaggtagtcgccagtttgtaaaccttgattattaaaaaaagtgagacagtgttgtaaatcacgactaacggttgccgcatcgaaaacgtgttgtgcggctaaatcagttactcgtgttttggctgttgattgtaagagttgtttttgcagggttgcgctgagtttagacatgacgaggacctcgttttaagtatttttttgggacgaccgatacaataagctaagtagggcgtttggtaacagagataggcaatcccgaaggataaaccgtagatgacaaggagcgcaattggtgtgattaagatcagcgccagggtgctcaggtgagtattggctaagaaccatttgaaaccagtaatcgcaatcggttgggcaagataaatgccgaatgatggctgggcgccgagtgcgacccattttgaaaaccagcgccaatgtggttctaatcggtgagcggcccaacgtcgacctaaatataggatgatcagaatgaaaaggcaggcgtataaaacaaataacggttgatgaacggatttagaagcaatatcacctaaatggagaatgaaacgatcataatagtaataaagccagatggctggcacggcgatccataaaagatgaatgagcttgggaccgtgactatcgagccattcagtcaattcttggtagttcaagcaggtgatagcaccggcgatgaaatagaattgataagtcccgacgaaaacgccgtaatgggagagtaggtaaggccagtggctggtatcgaggtggggaatcacgaatttaatcaatagggtaatgagaatttgacaccagaaactactgtagagaatgacgcggtggtaacgttgattgtgttgcaaccatttgaataatggcggaataatcagatagagttgcatcgtgacgagtacataatagagatagcctaaatcaccgtgtaataaatgcgggcccagttgctgataaaaggtcagcgttaacggggattgaccgtgcaacatgagatagaccagattccaagcgagatagggaatcccaatcagccagaatcgtttacgccagaacttcaataagctgacgggtcgatgactgagactaaaaaagagtaccaaaccactaacaaacataaaactggttcgggtaaaatgaaaagaggcgtgcaaaccaccaaaaatttggtaagttaggctagttggatcgaattgttttttgacgatgccgatggtgtgaatcgctaaaacgccaatgataaaaaagaaacgcataaagtcgatttcataaaggtgtttcttgttcaaaagcaggagcccctttgttaagtattagttattatgaataacttgatgagtactttaccggttaaatgtgacttttctgtaagttttagatggttaaaatcggatttaattttgaataaaatgggatagtggcctttttttaggaattgcggaatcggcgccataaatatgctataattgattgttatagcttgatctcggaattattatcaagtttgaaaggaatgattattatgacaaaaccagttgtcgcgattgttggtcgcccgaatgttgggaaatcaaccatctttaatcgaattgccggcgaacggatttcgattgttgaagacacaccaggggttactcgtgatcgcatttacacgaatagtgaatggttaggccacgaatttagtttgattgataccggtgggattgaaattagtgatgcaccattcgttgaacaaattaagcaacaagcagaaattgccattgaagaagccgatgtgattatctttttagtcagtgcacgtgaaggcgtgacggatgcggatgatcgcgttgctcaaattctttaccgggccgataaaccaattctattaggggttaacaaagctgataatcctgaacaacgtcaagatatctttgatttttacagcctcggcttcggcgatccaattgccgtttccgggagtcatggtcaagggattggggatttattagacgctgcggtggctaaattcccaactgaagatcaagaagaagaagacgacagtatcaaatttagtttgattggtcgtccgaacgttggtaaatcatcattggttaacgcgatgctcaaagaagaacgggtcattgtgtcgagtattgaaggcacgacgcgggatgcgattgacaccaagtttatggctgaaaacgatcaagaatttacgatgattgatacggccgggattcgtaaacggggcaaggtctacgaaaatactgaaaagtatgccgtcttacgggctttacgggcgattgaccgttctgacgttgtcttggttgtcttgaatgctgaagagggtattcgtgaacaagataaaaaagtcgcagggtacgcgcatgaagccggccgtgggattatcattgtcgtcaacaaatgggatactttggaaaaagataaccatacaatgaaggaattcgaagaccatattcggagccaattccaatacttagactacgcaccgattatttttgtttccgctaaaacgggcgtccgtctacagaacctaccagcgatgattgaacaagttagtgaaaatcaaaaccggcggattcaatcgtccctattaaatgatgtcttaatggatgcgacaaccgtcacaccaacaccagcgattaatgggaaacgattacggatttattacatgacacaagtggcggtcaagccaccaacgtttgtcgtttttgtgaacgatattaatctacttcatttctcatatcaacgcttcctcaaaaatcaattgcgtaaaacctttgactttaccggtacaccaattcatttgatccctagacaacgaaaataggtcaattttaaccgaatttagctaatatgattaactaaatggtgacgaaagcctttttttaagcaaaaaaccttgctatcactaggtttatatgataaattaaaaaatgaaatggtgatcaaatcattgtttcgtcatttttgaccactcaaaaatggtttcggtagacaatactgattatctgtgatgagcaggaggtgaaaactatggcaaacaaagcacaattgatcgaaggcgttgcaacaaagactggtttaaccaagaaagatgcaactgctgcagttgatgcagtatttggttcaatccaagatactttgaaacaaggcgacaaggtacaacttatcggttttggtacattcgaagtacgtgaacgcgcagctcgtaagggtcgcaatccacaaactggtgcagaaattaagattcctgcaagcaaagtacctgcattcaagccaggtaaagcattaaaggattctgttaaataagaattcaaacttaggactgggatctcccagtccttttttagtgtcaattaacggttaagtgagtcgaattgtgatagaataggacaattgaaaaagggtggttgaaatgacgaattcagaagagatgttaacagcattagaagataataatttagaagccgcggataaattttttaaacaagcgctaacggctgatgatccagatacgttgtatagtttggctgaagaactgtacgcaatgggtttcttagaacaatctgaagcaatttatcaacaattactcaaacagtttcccgatgaagaccaaattcggacgacattggcggatattgcggtcagtaatggacagcacgacgaagcgttggcttatttaagtgacattacgccggagtcaaacgcttatgcggaaagtttattgacagccgctgacgtttatcaaaccatgggactgccagaagtcagtgaacaaaaattattaacggcgattcgtgcctttcctgaagaacctgtgatgcaatttgccctggctgaattatatttcgaattaggggaataccggaaagcggctaattattacgaagccttgattgaccaagacgtgacggaacttggccaagtcgatattcaaaaacggttggcaacgagttatgccagcagtggcgcgtttgaagaagcgcttgaaatctacgagagtctgcgtcaagaatttttaacggcggacgatcaattccaaatgggctttttatatctccagattaaagattacgaacggtcaattaagttattgacggccttgcaaaaatcagatccacaatacacatcactgtatgcgtatctagcaactgctcaagcggcaatcaatcaactggaagcggctctagtaaccgtccaaaccgggattggctacgatcaatatagcgaagtcctttaccaaaaaggcagtgaattagcgctccaattgggagacgatgtggtggctgaacaaatgttgacgaaggcgctagcgattaatcccgataatatgggtgaaatcaatgcgttgagtgcggtttatcgccggcaaaatcgccatgctgaaaatatcagcttggttcaagaggctatcgaaaatcataaaccaacggcggaattatattggtcattggcgcaatctcaatttgccgaagaacaaatgacggcggcgcgggagaattatttattagcctatcccgaattaaaagccgacccagaattcctgcacgatttaattcgtttcttccaagaaatggcgcaagtgccagaattattatcggcactagaacaatacctaaaattaaaaccgaatgatttagacatgcaagaaatgtatgaagactataagagcgctgattcaagcgattagacctcgagcataacctaaaaatagtccagatggttggaacttaaaccatctggactattttgtagttagacggagaggttggcctagaagtgcgttttagattaagcggaagttgttacaaccaaaaacgcgtcttcgtaatcaaaaaaaccccgcaacttttacgagttgcgggtcttttgctatctattcagttttaacagttggttttgtgggtgtggcagattcatacgtaaaaccttcgccaagtgcttcatggacgtctaagatggagacgaaggcttgtggatcgtgggcttcaataattcgttttagctgtgtaatttcagttggactgacgacacagtagagcattggttgttgttgatgggcataagcgccctctgaatggaggaaagtaacgccacgttccatatcggcgatcacatcgtcggcaatcggttggaattgttgactgatgatcagaacccctttagcggcataagtgccctcaagcgtgaaattaacgacgcgggagaacacgtaagacgccagtagcgtatacatcatatgttcaacatctagataactcaatgaagcaatcaaaacaacaatatcaaacatcagtagtgagcggcccatcggcaaccctttttctttttcaataatccgggcaatcacgtcgctgcccccagtagtgccgccgtaacggtagataatgccgctgccaaagccgccgcataaaccggctagaattgacgcaattaaaatgtcgtggtttaaatcaatcatgattggcacccgttgccaaatccataggaagacggacatcatcgctgtcccataaatcgtataggcgagggcgcgcttgcccaagaaacggtacccgagaataattaaggggatgtttaaaacaatcgtcgtataggcgggatcgaaatgaaaccaatagcgcaaaatcagggtgaccccggttaagccgccttcagctaaatgattttgaatgttgatggtcactaacccaaacgcatagatggcacaccccaaggcaatgacgactaaatcgcgaatcgtcgtagccgttgttattttttttgtcaaaataatccctcctccaaacaatcgttacctcaaatatagcacgaatttgcaaaaaaccaactgttagaagggcagtcatcgataaataaggtatggtatgataaataagaataatcaagtagtagataagaggttaatgtatgaaagtcacaacttttgcgccagaatttgaaatggcgttaccaattttacaccaaattgaagcggcgggttttgaagcttattttgtcggcgggagtgtccgcgattacttattagggttgcccattcacgatgtcgatattgcgacgtccgcttatccagccgaggtcaaagccatatttgaccggacggttgataccggtattcaacacggaacagtgatgattttggatcacgggacgggttatgaagtgaccacttttcgaacggaaacgggttatcaagattttcggcgccccgattcagttactttcgtccgatcattagctgaagatttaaaacgacgcgattttacaattaatgcgctagcgatgcgtgcagatggtgaaattattgatttatttgacgggttagcggacttaaaggcgcaaaaaattcgggcagttggcgtggccgacgaacggtttcatgaagatgcgctccgcatgatgcgggcggtgcgttttgaaagtcaactcggttttgatgtgacgccgacaacccaagctgcgattcaaaaacacgcggcactgttagcgaaaattgcagttgaacggatccatgttgaattgattaaattgatgcagggccaacgacgacataatggtttaaagacgttactcgcaacgggtttaaatcagtattgtccgggcttagtggatcaaacggctgcattacaacgattgattgatttacccacacaacgtgtcacatcagaaagtgcggcgtggctcttgttaacggcgacactgcaactaacacctgcgaccgctaatcagttccttaaacagtggaaatgtgccaacgacgtgattgctgacgtgacggctggtctggtgttattaccgcaattaatcgaacagcgtgcgcaagcttggaatttatacgaagcaggcgaggctgtattgaccatttgtttacaggttggtcagttgttagcgccgagtgcaattatggatcaggattggctggcacactacgcggcattgcccattaaaacgaagcgtgaactccaaattaacggtcaaattttaatccaatcattagggattcaaccagggccaaaactcgggcaaaccttgacgcagcttgaaaaattagtggttaatgggcagttgcctaacgagcaggataggttagtccagtgggttaaacaaaatagcgctcttagcgactaaagtatggtaaaatacgtttgtaagcacattcagaaaggatgaatcgcaatgacacaacatgtttttaaagaattgaaattttattttcgtaatggtgacgtttggaccgtcaaccataaagaattgaacgatatttggattagtcgcgtcaccactagttacggccgcattgaaggtggtccgatgcaagagattcatccttgcaagagctttaaagcggaaattttacctgaagccgatcacgttaagagtgaagacatcaacaccggttcattagagatgggcatgtttggtcgagcgactaagtatcaagatatcgaaaaattggatttagtcttccaagacgatcaagataaggccccgcaacaaatctatttcccatttaaaaataaagacaatagcggtttggataatatttatcaaagtagtcaaatttctcaaaagaacagtcacctctacattgtgattgatgcagaacatacgattgccgatatttatccagaaatttaaggtctatttcaaaaaagtgagcgatccgattagggattgctcactttttgattgttagttaggccaaaattcgctatgattgaagataacgaaagtaaaaaaggtgagctaattgcagacattaacagcgacagatttaaccaagacatatggtgaaaaaacgttatttgaaaagatttcatttttaattcgcgaaggggatcgaattggtctcgtcgggattaacgggactgggaagacgacgctcttaaatgcgttaaccggaactgattcatacgacagtgggcaaattgaaacgcctaatcagtattcaattagttatttggcacaaaagccgaattttgattctgaattaagcattatggcggccatttttgcgggcaataacccggtttttaaaaccattcagaattatgaacgggttttaaatgcgtataccagtgatccgactaatccgaaattacaaacgcaatatgaacaagcggatgctcagatgacgcaacaagatgcttggtcggtcgataccgatattaagacgattttaacgcaattgcatttaaccgatttagaccaaccgattaatacgttatccgggggccagaaaaagcgggttagtttggcgcaggctttaattgaaagtcccgatttgttgattttggacgaaccgaccaaccatttggattttgattccattgaatggttggaaaaacgcttggcgcaataccaaggcgcattattgattgtcacgcatgatcgttacttcttggatcgggtcgctaatcagatttttgaattggatgccggccaactctatacgtacgatggcaactatgaacaattcttaatacagaaagcggaccgcttagaacgggaacaacaagccgcccataaacaacaacaactctataagcaagaattaacgtggatgcgtgccggtgccaaagcacgaaccacaaaacaacaagcccgtattaatcgcttcaacgatttgaaatcgaatttaacggccggaccggatgattcagaagtcgatatccagatgggccaatcgcgactcggcaagaaagttttagaattgaaacaggcgaatttaaccttagacatgcatcggattttaaccgattttagtatcttaatccaagctaacgaccggattgggattactggggtcaacggcgcgggtaaatcatctttactaaacatcttagcgcaacggattccgttagacagtggcgaattaatcgtcggtgaaacggtcaatttaggctattatacgcaacagaatgaagattttgatccgaataaacgggtgatcgcctacttacaagaagcaggggaagaagtcgttggtcggaatggcgaacgcatcagtgtcacccaattattggaacagttcttgttcaaccgttcaatgcacgggactttaatcggtaaattatccggtggcgaaaaacgccgtttgtatttattgaaaatcttgatgcaacaaccgaacgttttattactcgatgaaccaaccaatgatttagatatcggcacgttaacgattctggaaaattatttggataacttcaacggcaccgtgattacggtctcgcatgatcgctatttcttggatcaagtggctgataagttattggtcttcgaaggtgcgggtcagattacgagtgaagttggtttgtttagtgattatttggcgaaacaaggtgcccccacgactagcaaatcggcgaatgttaaaccggtcgtggcagaagcacaggcggaacccgttaaaaccaaacagaaattaacgtacgcggaacaaaaagaatacgaccaaattgaagctgaactagaaggcctagatgaacagattgaagccatcaaaacgcaaatgaacgaaaatggcgctgattatgataaactagcacaatggcagtatgatatggatcaattgaatcaacaattagatgttaaaatggcgcgctgggattatttaagtcaatacgcctaagtagcgaataaggagactattatgtcagaacaaacttatctggatttagcacggactattttggaaacgggtcattataaagaagatcggactaatacgggcacctatagtttgtttggctatcaaatgcgctttgacctacaagctggttttccattattgacgactaaaaaagtaccgtttggcttaattaaaagtgaattactgtggttcttgaagggcgattcgaacattcgctatttgttagaacacaataatcatatctgggatgaatgggcgtttgaacgctatgtacaaagtgctgattacaccgggcctgatatgaccgattttagtcatcgggcccaatccgatgcagcctttaatacggtttaccgcgagcagatgaaacagttcgacgaccgaattttagccgatcaagcgttcgcagatcaatacggtgaattaggcgatatttatgggaaacaatggcgcgcttggcaaacgcgcagtggtgaaacgattgatcaaattaaaaatgtgattgaaatgatcaaaaccaatcctgattcacgacggttaattgtgtcggcgtggaatccagaagacgtgccctcaatggctttgccaccgtgtcacacgatgttccaattttacgttaacgacggtaaattatcgtgccagttgtaccaacgtagtggggatgttttcttgggggtaccgtttaacatcgctagttacgcgttgttgacgcatttaatcgcgcacgaaacgggtttagaagtcggcgaattcattcataccttaggggatgcgcatatttacagcaatcatctcgaacaggttaagacccaattagaacggccaattcacgcggcccctcaattgtggttgaatccggataaacaaagtatctttgactttgacgttgccgatatcaaaattcaaaactatgaatcagaacctgcgattaaagcgccggttgctgtctaggaggaaaagcgatgattgcatttttatgggccgaagatcaaaatgggttgattggacaagacgggcatttaccgtggcgtctccccaatgatttagctaattttaaacgtgaaacgatcaatgaagtcgttgtgatgggccgtaaaacctacgatagcttacccaaacggccattacccggtcggcaaaacattatcatcacgcgtcaagtcggtttaacggctgaaccaggggtcctcgtgatgacgcaatcagccgaattattgacttacgcgcaacaaaatccgactaaaaagctattcattatcggtggtgctgagatttttaacctctttaaggcgcatgttgactatttatacgtcacgaagattgcggccgcttttaaaggggacgtctatatgccagaactggattacacacaatttaagcgaattgatgtcaaagccggggttgtcgatgaccgtaatcgctatccgcacacgtttgaaatttatcaaaggcttgattaaccgctagtcaatggctgaattcttattaaattttgctgaaaaaattgacatgttctgatatactaacgataggtatttatcattcgatgaatacgcaatcaagggatagctgacaacgattatcctaagaatgaatagaaagtgtggctgaagtaacagtggctaatattaaaattgtaacggattcatcaatccaattaacagctgaagaaattaaagaacatcacattacagtgattccattgaccattatgattgataatacggtctatattgatggcgaaacgattacccgtgatcagtttatgactgaaatggctggcgctagtgctttacctaagacgagccaaccagcaattggtaatttcattgaaacttacgaaaatttggccgctgatggcagtcaaattttatcaattcatatgttgcgtgccattagtggcacggttgatactgctcgtcaagccggcgaaatggctaaggcagacgtcaccgtaatcgatagtgattttacagatcgtgcgatggccttccaagtgttgaaagcggccgaagttatcgaaaccggtggttcaatggcggacgctttaacggcgattcaaaccgtgcatgatcacactaagttgtatatgggcgtcactgatttgacgaacctggttaagggtggccgtttaagtcacgctgctggtgtgatttcaagcctattgaatatcaaagtaatcttagaagtcgctgatagtgaactgaaggtattgcgtaagggtcgcggtatgaagaccattacgaagttcattgatgagatggaaactaatttacgtgaattaaaaaatgttaaagcaattggcatttcacatgcggacggtttggaattaagtcagaaaattcaaacgcagttacaagctgggtttcccaatattgaaattctagttcggacaaccgaccccgtgattgcaacgcatgcgggtgccggtgcgtttgccgtcatgtattatacagaagactaaggtttaaattgtaaatgtaacacataaggctggttgacattttacgtgtcccagccttcattattatctagtttattttgaggtggcagaattgaaaaaaacgcgacaattattgattgacttgggaattttagtcggcgcgattgtcattgtttttgtaatttggcaattgttgacccctaaacccaaacaagtcacgaacgcaactgaaaaaacggctcagaccgaatcggttcaagccagtcagcctaagcagaccctccaactggtcgcgattggtgattcattgacgcacggagttggtgacgaaaccaacaagggcggctacgtcccactcgtggcccaaaagattaaacaggcgactggtcatccagtggccaccgtcaattatggtgtgacgggtgaaaagagttatcagattgaaaaacggattcgtgagaaaaccacgattcaaaagaaactcaaacaagctgatttaatcacactgacggtcggtggcaacgatttaatggccgttttacaagatgatttctttgagttagaccaggccaaagtcacggcgggtcagaagcaatatcaaactcatttaacgactttattaacgcaaattcgccaacagaatccggatgcgccgatttttatcatgggcgtctacaacccattttacgtttattttccagaaatcaccgggatgtcaaaagccgtgacgctctggaatcagaccgctaagacggccgctaaggaattcaaagggatttattacattaacagtgatcaagatttaactcacggtgacggtcattacgtgaaacaaacgaagtcattggccaaaatggatagcacgcagatgcaaaaaacgttggcggctaatgaacatttgaatccgtatattagtgatactgatcatttccatccgaatcaaaaaggctatcaattattgactaaatcattttggtcggtaatgaaggcccatcaaaagcaatggctcaaaggaagtaactgatgacaactagacaatctatgaaacaacaaaaaaagggccaacagcccaagaaaacgattaattattggaaatacagtttcatcgtgttactggcgctaattattggcactgtgggctttgttggctataacgtttcggcgccgcaaacccctgcagttaagactgaaaaagtgattaaagcggatagtacgtttgaaattcaaatgcagaagaaacaaatcaatagtttagtcgcgtattatttgcaaaattacctacaagattctaaaataaagtatcaatttacattgggccaacaggcgattttatccggccagtttaaattcttagggtttccggtcgaatttaatttattcttccaaccctatgtcttggaaaacggcgatgttcaattaaaggcgaaacagctagcagttggtcaattgaaagtgccgatgtcctttgtctttaattacatccaacgtcaatataaattccctaagtgggtggttttaaacgctaagaagaatacgattaccttacgcttaaacgaatttaaactcgataacgggattcaagtgacggctaaacacattaatttaaaacaggataaaattgatttatcggtttatataccattaaaaaataagaaataaggtggcggcatgaagcagagtttttatcgctatttaatgacccagcgtgatcccaataactacgaaccaattgctcagtttgcgaacaatgctttttttgatcaatcatttcccaaacaaatcggcgagtatgaaccgctatcgcgatatttagagctcaacgggagttatttgcccagtatgacgatttttgatgaagcctacgtgttgtatcaagaaagtgaacaagcctaaggagagccatcatgaaacggcgattcagtagattgagcagttggttattaatcatcgtcatcaccggtttggtagcgctcgggattcgcacctgggtattagtgccagcaacggttgttgggacgtcgatgcgaccaacattagaaccagggaattatctcgtattgcagaaatttggccagattaaacgttttgaagtgatcgtctttaaattggatgggacgacgtatatcaagcgggtgattgggttaccgggagaacgggttagttacaaggatgatcaattgtcgattaatgatcatccggttgccgaacctttcttgacgactaaaaaagatcaagagactgttttgacctctgattttgatttgtcgattttaaccgggcatcaaacggtccctaaaggctattattttgtactcggtgataatcgacgcatcagtaaggatagtcgcacgtttggtccaattgatgaaacaacaattattggccgtgcgaagttggtttattatccggtttcaagaaggaaattactataaatggaggcaggtgattccggattaaggatcacttgcctttttttgagttgactaagttgactaattagcgaatcttgctaatattaagcgtagtattattgtggcagtaaaggagagagtcgtatgcaatctaaaacattaatctttggtcatcgcggttatcccaaacaatttccggagaatagtttggcgggttttcgttacgctttggcacacggaattgagggccttgaattcgatgtccatttaacgcgcgaccaagtaccaatgatcatgcacgatgagaagattaaccggacaacggatgataaaggtttcattcaagactattcattgtctgaattacggcaagtccacttgaagaacggtgaatcaattccgacgttagctgaattcttaacgctggttggcaatagttcagtgcagcttaatctagaatttaaaacggatcaaattcagtatccggatattgaacggattgtatttgcgatgctgaaagaaatgacactcaacaaaccggttattttctcatcatttcatttaccaaccttagaacgctgtcagcaattggcccctaatgaaatttattgctggctaaccaaaatgaatgtgcctaatccaaaccaatttttgattgatcaccacttagctgggttacatttaaaacactatcagtccgatatgactggcacacaacgcatttggacggtcaatcgaagagggccagcaatcaagttatttaaacagcaagtcgccggcatctttacggatgattttgtgcagatgatgcaaatacgtgatcaaaccatgtaaaaacaagctgtgacagaaattgatgagttctggcgcgcgtcaaaaaataatgttcgtttaatatcagaatacgacgacttatgtcacagccccatgtaaaaaggcgcaacaccagtatatttactgatgttgcgtctttttttagctggattaatcaagcgtaaccgttccattattaatactgaccgggtcattactattgatttggccagcggtcgcatccgttaaatatttaatactatcggtcatgccgacaatcggagggccggccttaacggtaatcgttgaagcgacttcgccgggttttagggtcgccatttgttcaaaaattgtaacatctgtttgtggtaaatcacttgcggcaacgagtgcattcgttctttgataagtggtcgcgacaccttgaccgattcgaatgagttggttggcactggtgaatagatagagataaccaatgctgtcaccacttgcgacggatttagaagtgagttgatagccagcttgggcggcgttgaccttttgggccgcgtaaattgtgttttgattcagtgaaacgagggcatagtcgcctaacgattgaattgcagatctttcgaaactatcgtaacggtgttgatacaaataaccgtctttaatcatgatcttacccgtgtcattggcactcgtcgtcgtttcgggcgcaatccacgtcccatttaaccgatctaaggcgatggcactggttgttttcttggtagcggtgtccgtaaaagattgaccgcgatcaatggtcgttgttttatcagtatccctgtaataaatattaatagcgtataagtgatgtccgctcgcaataaacccttgaggtagggtcataccgctgactttggtttcgaagaaaactaaatcggaaagtttagtcactttaaccgtggcacctaattttttgaggaccgcgttgatttgggggaccgtcattaaatgaatttgggcttgggcacttttggtaaaatgttggcgcatatcggtttgccattttttaagtgaaatttgcttatatttaacggaagtactaatgagggttcctttagaggctgtccaacttgattgattatcgattttggagacttcagaagccgtcagtgtatcggaaactccgtggctagtctgttgcgagctgatactctgactaaacgtccaggttttggaagcggattttaaaagactttcggtcgtcggtttgaccgaattaaccttggtttgtttggtttgtggttgactgcaaccggttattaataatgctaataaaggaagcattaagaagattgatttgcgcatgcaaaggactccagttcgtatttagtgctttaattatagcattaaactaagatgacgctaaaaaattattgagcgcctttaatttttgaagttaacccctgaaattggagaaatacaatttcaggggatttttgatgtggcgaattatcaattcggcacaatgatataaaaaaagccgctagtgatagaattcgctatcaccaacagcagacattgtagaattaatttaattaacagtaataatctcgttaataacgtcgattacctataagatattaaaatataaatatttttcatgcgtcccagtatataggacgaattaatatacaatatgggcataataataaggtcataactcaaaagttatgaccttataccttatgtgaatagtttaggctatttcctaacggattgcaactattttttaggttaaagttaataatattaataatttatgtaatccgccgtatattaatatttatgcatgaatttttggaaaaggacagtttttgtcaaaaaaaaggatttggatgttgtagacgattacattgccggtgtcataacttttgagtagtgattggtaaattgttaaacgctgaaaagggtgcaattcaattgatgagattcatttgattaagttaaatgtcgcgattaacaactaatggcgatgattattcaagaggtgaactactaactaatcaggatgctgttatacataatatatattagtggaggaaactatgcaggtggaattcgaaacacttcacgtacttaaacgaaaaatcgatgaattatttaatagtgtgttaggtggggttgaacttaccatagaacagtacattttaatgactgttgtccataaatcaggtagacagaacccgactaagattgcggctgaattgaatatttcaaaagcagcggtttctaggcgttgtcgagagttggagcgtagaagattttttgaacgattgcagcctgatgttgaagatgattgtcgggttatctattacacgttaacgagagaaggtgaacgcttgttaaataaagtaaacggtctgattaatgaggtttatcaaatggatactgaagatgctcatcagctagatagtgacggctgcatcattaatgccatccaagtggttaatacaatgattacaacgaataagcatgcaagttaatcattgagacatagaaggagcgtattcaataatggggggcatcacacaaaaagagttggaatcgcttgaaactgaaattagtcaaattattgataaccttgatcaagagaagcagttaaaacaacaattgttgacggaaaacgaaacgttaaaacagcaattgactgaattcaaacggtataaaacgaaatatcagcaactattacttgaaactgcacatttgaaattaaatcagccggcacaatcttctcaaactgcgttatctgaaagagagattgcggaagtgctattaagcgctaaaatgacggctaaacagattattcaaagtgctaaacaagaagcccaagaaattgaacagattaagaaatccgcactacaagcgattaaaactgatgagcaacaattccaaaatcagattgaggcctctaagtcatcggaacctagaatttatgtaaatcatctagaaatgagatttggtaatgaacgtactttagacagcattaaggaacagatgcaagccgttttccaagaaatgttctcgattagcccggacaacccacaaaatgaagtcaatctaactgtgaagaaaactaagtctgaagagatcaaaccagagaccattcaaaagcgtaaagcaactgatacaagtgtccaaacatcgaaagctgaatcaaagaatcaagaaggcgcaacatcgttaattgcaaaactcaaaaaaaaaaatgaccgacagcacgtcaaagccgctgttcgtaaacgaaaacgaattcgccgtggcgtgattgggttactagtcgttggagggctggtttcaatgaccgttacattaggtcaattttacgcgattgctcaggtacaagggcattcgatgaagccaacgttgaaaaataagacgattatggtgattcaaaagccacccgttaagttagcccgtaatgatttaattacctttagcgtgcctagtatgggcaatgaacactttgttaaacgaattgtggccttaccaggcgattcaatttacgccaatggtggtgatctatacgttaacggcagacgcgtcaaaaaaatctattcaaaacaaacgaccgctgatttttcattgtttgaaacaagtggtcaaaataccgtgcccgccaagaaaatattcgtgttgggggataatcgccaacattcaaccgatagtcgtagttatgggtttattgatgacagtcaggtcgaaggcaaaatattatttaaataatggttaacacgagtaaccgttaatacgaggcaatctgggattcatttagttaagtatattaatggcagcgaaactaaattagtttaaatcgaatccagccatattaaggaggtgattcaaagatgcggaaagttcccaagtacttggttattttagtgcttatgttgctatatgtggttaatactaatcaaatgagtcatgcagaaacagtggggtcggttatcagtcaatctacaattagttttgatcagacctacattccaccaattgataatcaaacgacggtgattcctgatggtaatgtggtcgtcccaccaagtcaatcgagcactaaactgccacaaacaggacaaaagtctgaaggttatctagtatggattggggtcgtacttatttttagcagtatcaaattgagaagacgtaacactattctgggaggaatataacatgaaaatcaataaagttctaatggcaagtgcagttgtattggcaacatcagtcaacctatcatcagtcgcaatggcagctgaagcaggtagtgtgacaactaagggcgatgtcacttttgtagaagatactgatccaacaacaccggttgacccaacagaccctgatgtgccggttgatccaactgatccagataaaccaaacccaactaagggaccgttgagtatcgattatgcgtcaaatttacattttggtgaacaaaaaatttcagccaaaactcaaacttattttgccgcaatggacaagattaaagacccagctgatgccaataacacgctggataaaccaaactgggtacaagtgactgataaacgtgggactaatgtcggttggaaattacaagttcaacaaggtgcgcaattttcaactggtgcagccgaagaattaaagggtgccgaaattaaattaatcaatgggattgttaaatcaacagctgataaccaagcgggcaaacctacagcctcacaagaaatcacgttggttcctggtagcagcacaacagccggcgctgctcaagatgtcatgactgctcaaactgatgaaggtatgggcacttgggtcactggttttggggatgatacgactggcagcaagagtatttcactaacggttcctggtgcatctgcgaaagtcaaagatggtaaatacacaactgatttaacttgggtcttaactgatacaccagcttaaacaacatcaataacttatttggggagataagaataatgaaaaaatcaattaaatattcaacagcaatgcttgcgttgctattaggaacgacaattatgagcaacaccgcctttgcagctgacggagcatccgtcaaatcaatcgggaccatttcatacgtgccagatgattcaacggtgacgccgattgatccgattgatccagatcctgaaaaaccaattgtaccaactgatccaggagatcatgaaaatccaacggctggcccattgagtattgattatgtgtcaaatttacgtttcagtgaacaaaagacaacgggccaaaatgcaacttactacgctaatctggataaaatcattgagagtgatggtagtcagattgaacggcctaactttgtccaagttaccgataaacgtggtagcaatgctggttggcatttgacagtcactgaagatgcacaatttaagagtggcgaaaatgaattaacgggtgcgcaactgacattaatgaacggaacaatggcaactcctaatgatgggatcgaaccaacggctgaacaaaaaattgccttgacacctgggacggcttcagatgtcttggatgcaaaagcagatcaagggactgggacttggttagaccgctttggtactgacgaagcagcaggcaagaagagtgtttcgttatcagtacctggtaaaaccaagaaagtacaaagcgaatataaaacaagtttaacttggacattaaccgatacaccagcataaagaatggagatttgacgtgaaaaagagaaatctattggtatttttaatgggatttatgtctttattgattggcattaacaaagtttcagcagcggaaatgagcttttcagttcaagcggatattccaaccaatcaggtggataagtcacaaagttattttgatttgcggatgaaaccgggccaagcccaagatttaacggttgagatgcgtaatgatacgaaggacgacgtgacggtagaggtcttaccgaataccgctattaccaacgataacggaatcgtcgagtataataacaccaccaaaaaacgtgatagtagtttaaaagtcggattcaaagatatcgcaaccgcggataaagaagtgacgattccagctaaaagtacaaaattactcaaaattcacgttcagatgcctaaaaacgagtatacagggactattcttgggggcgtttatttcactgagaaggcttcagcagaaacaaacaagacacaaaaaggaagtcagattgttaatcgatacgcttatgtgattggtgttaagttaacggagaatgatcaagttgttaacccggcgttgaaactaaattcggtcaaagccgatcaagttaattatcggaatgtggtgactgccaatatccagaatactgaatcagcgattctgactgatttaagtattaatggtcaaatttatcgtcagggtcaaaaagaggtgctttatcaagcaacccgcaagaaccttagaatggcacctaactctaattttgattatgggattagtcttaataacaaggcctttaaaccgggtaagtacacttttaaaggggttgcgaagtcgaaggataaaacttggcgttttgaaaaggatttcgaaattaaaggtgaaaccgcaagcaaatacaataagaaggcagtctcactagaaaaagataatacttggatttatattttaatcggcgtgattatctttgtgctgttattgattgtcattttagttttaatgcgtaaattgaagaaagcaagagatgtagactagttgatatcttgcattttttaactcgatagttaatggttttgatttacgaggttaacagaaactgggaacttatcgaagaatagcgattcttttgataagttcttttttaatgaggtgggaataatgcgaaaaatatttatatctatcagtttgagtttaatggtattaatcgggatcggtggcattttatggggccctcaattattagcaggggatgcaactgtgactgatttgacgcttaaaacaaccgtcaaagcgcaaacaatcctggttgatgttgacgatcagaatccaaacgatcaaaagatagtcatgccgttaccgaagaacattgactatcaacagaccagttatgctaacgcggcggtgacggttgatcaagcgaatcaacaactggtcattgattggttagcgggccagcctaagcaaattcaaatcaagttaacggcagccgaacccggcgattatcaaatgaagttgcagaccgttcgtgatggggtatcggttgaatctaaaccggttgttgcgcagacaacagcgcccaaggtagcgactaacaatagtagtgtcattgtgaatcggacagcagcggttgccaaggtgactggtcaggcgatgacgatgaatggccatgatatttacagtgtttggaacgcttcgctcaatcgattggcagcaacggatttaacgaataacatctttaaagtaattgagacgcaaaattatccaactaacaccgccgtttatactaatgatatgtcctattacaataatcagatatatactttttatggaactaaggggacctatacagtttggaatagtaatggtacgtatacggtttctaaagtttatagtcaggcaattctaaaaatcggtgtaccaaccatgtcggctgatgggcagttctatggcttttattctgataagaaaaattggcatttaagcaagcttgatactaaaacgggaacctttactgataaggttttaacctttgcaaaggcggatgacgtcaaaactttctacggcaacggtgatacagttgttgatggggatggctacatttggaaagcgtcctatagctcaactgatacgtatcttcaaaagattgatgtcaacactgccaaggttcttcaaacgctgcatgttcgatcaacaaacggtagttataaagtcgatcagattgctggattagcatttatgccaaatgggcaattagttgtttctggtttaaataaaattggaattattaatttatcaacagggacggtgtcatatttagcagggacaatatcctcaggcgatttggcatctgggaataaaccctacttaaatacgcatttaacggctgatttaagtgcgtcgccaactgttgatacgcctttacgtcgggatgatgtggtaacttatactcttaaagtggcgaatgacggcaatttggcgtcatccaatacagcggtgaccaacgcaatgccagctggcacaacctatgttccgaatagcaccaccatgaatggggctagcgcagctgatgtgaacggggcatcaccgttagtagctgggttatcgattaaatcgactagttcagctgacggcgttgttggtaaaggtcaaccagtgacgattacgtacaaggtcaaggttaatcggaatgttaaagatcaggacaaaattattgatcaagcgaccgttaaatcacagggtaatgcggatcttaccagcaaccaattgactcatactgtctcaattgtcaatccgccgaaagtggaatatgccgttcaggtcttaaataattacacggcacctgacgataaacgaattctattgggcgatcaattacaagttcgttatcaagtcaaaaacgctcaaacttcgaattcggcctttcaaaaagatcaagcgacttggtcctttaaattgcctgaaggggctgatctagatagtaccgaagcgacaattaacaagtcgtacgggacttctacaacggtgccagtcagtcaactatatgatgcaaaaacacgattgatcacaattaattcagcaaccgtcggtgattttaaattggatgcacaagatgcagtcagtgtagatctcaaggtgcaggtttctgatagtgatttatcactcgttggcaaaaacatcgaatcggtgcacacggtcgcaggaacggatttaaatggcgatcaacagactttaaccagtgatggcaccatcggttatggacccatttattctggtaaattacggtttaaagaagtgccagcaaccatttcgtttgctgattcaaaaattgccagtaagacaactgaaagcaaacggaaattggccgactggaaaatcatagttgatgattccagacgacgtaagaataattggcacgtaacggctaagctaagtgcaccgtttgagtctacggatgggtctcagttagccggcgacagcctagtctttagaaaaatggacactgccgatcaatacatcgattcaacgagcaacgtcgacgtttatgatggtatcagtacaacgaccgaagatgattatgatgtttcttgggcggcggagaatggtccattattgcaaattgcaccaggtacggccaaagttgggacgtatcaaggtacgcttcaatggacgttgattgatgcgccagtgtaaaaagtggtcgcgtaaaccaatgattcgaatataaaaaaagaattcattaataaaaaaagtgaagatatgatagaattatactaactgattcagttttagtaataataactattaagtcttcgcttttttgtggtgtgtaatagttatttcctattataattgttatatctagtaagcctgtaaaattgatatgttttcagcaaatgagtgaccaccaagtgcaaactgctttggtatgaaaggaattaaaataattatgacgattcaatggtatccggggcatatggccaaggcccaaaaacaaattaaagaacgactaaaattagttgatattatcctagagattgttgatgcgcgtgtgccagaatcatcaattaatccgatgattcaagaacttggtcaaaataaaccggtgcttctaattttaaacaaggctgatatggccgatgcacaaaaaacgcaacagtggattgaaacgtttaaaaaacggggcatcacggcgatcgcgttagacgcgcaacataaagccaaattaccaatgattgaaaaagtcgcgcaagaaattctagctgacaaattagcgaagaaacgggccaaaggaattagaaatccggtgattcgtgcgatgtgtgttggggtgccaaacgttggtaaatcaacgattttgaaccgactaatgcataagaatattgccgtcacgggtaaccggcccggggtcactaaaaatcaacaatggttaaaggccagtgaacgttttgaagtactagatacgcctggtgttttatggcctaagtttgatgatcccgcagttggtaataaattagcgttaaccggtgcgatttcggatgtggtttaccatgcggatgatgtggttgtgtttgcgttggattatttcaagcaattttatccaaatcaattacggaaaacgtatcaggcaaccgatgctgatttagaacaatcatcaccggaattaattatgattctaaccaagcgacttgggtttaaagaagattatgaccgtttctgcattaagtttatcaacgatgcgcggcaaggtaaattaggccgcttcacattagatcctgtgcctgcggaggcgaaaggcaatgactagcaaacagtcaattgcgacgattaaggcgttactcgctgaaccagttgctcaagctgtactgaccgaactagcattagatgaccggagtggtgttcaaaaactactggttcaatatgcgaaacgccaagctaaattagtggcccaacaggctgcttttgaagaacggcgccaaatggaattagcgctctggcccgattacccgcttgttgcggggattgacgaagttggtcgaggaccgttagcgggaccagtcgtgacggcagcggtaatcttaccgcatgattttgatctatggcaagtcaacgattctaagcagttatcctttaagctgaaacaaaccttgtatcggcaaattatggactgcgcgattagcgtcagcattggaattgctgatagtcagcggattgatactgaaaatatttatcatgcaactgaacttgcgatgggcgaagcggtcgacggtttagagcagagacccgattacctgttagttgatgcgatgacggtgccgaccgatattccgcaagaaaaactgattaaaggtgatgcgcgtagtgtcagtattgcgtcggccagtattgtcgccaaagtcattcgggatcaattgatgattaattatgatcaacaatatccggggtatgattttgctaacaatatgggttacggcacggcgaaacatttagccggtctggctgaattaggggtgaccccgatccatcgacggagtttttcaccggttcaaaacgcgttataaagtttaaaaaataaacagctcttttgcgtaagattaattaacgtaaaggagctgtttttgtatggttagtaaacgacaattattattaaaagttcatttggcggccggttttggcttgacgagcgaattaagattggcaaattggttattaacgagtcagaattgggaattgtcgcccgttgaattagcgcagattggtcggttgccagaacgttattggtcgacttttcaggccagttttcaaagtgccgcagtacaatgtgcttgtgaatatcacgaacagtttgcgacgtatctgacgattattgatgaagcctatccgcagcggttattagaaacgtatcaaccaccggccgtgattttttatcggggaacgttggcttgtttgaagcaaccggccttaggaatcgttggtgctcgccaagcgggaccctatacgaaattagcgttacaccaattagcggccttgccaaccacgaccgcgattatcagcgggcttgcccaaggtgcggatgcgatggcccatcaatgggcgttgcaacagggccgcgcaccgattggcgtgattggcaccggcttgaattgttgttatccgccgcaaaatgaacagttacagcaaaccgttgcccagtgtggcttattactttcagaatacccgttggatacgccggcccgcaaatttcaatttccagcgcgcaaccggattatcgctgggctgtgccacggattattggtaactgaagcgcggcaaagaagtggcagtttaatcacggctaacttagcattgcaagcgaatcgcaacgtttatgccatacctgggcgactcgatcaatccttgtcggcgggctgcaatcaattaattctagcgggggccacaccgctgttaaatgcgacgttattgactgatgagcttcgttattttgaataggccaagcaaaataattgcttacaaacgatttcctgttattattaaagttacaggttaatgattagccaaatgggaaggaagtttttaatgatgagatatgcaattacaggggcaactggtaaattaggtcacgggattttaacggaattaatgacattggtggcggccaaagatattatcgcaattgtccgcaatgttgaaaaagcccaaacaattttgccagcaggaattgaaattcgccaaggagattatacgcaagcgtctgcgatgacgacggctttaacggatgttgatcgcttgctattcgtctcttcacaaccaggtggtgcagtcagtcgcgaacaacaacacttaaatgttgttcaagcggctaaaaatgcggggattcaatggattggttataccagctttccagatgcaaatcatgcaacgaccccattagcgttggaccatcaagcagcggaagcggcgattctagccgctgggttaccccattcattcttacgtaataattggtatcttgaaaatgaattagggctaatcaacgctggtttacaaggccgaccatttgtctatgccggtggcgacggtcaagtcggttggacactagaagccgattacgccaaagcggccgcacatgttttggcaacagctcaaccaaaagacgtctatgaattttcaggtgagggtcatacgtacgctgaattagcagcggtggttgctgaattgagtcccaagacgttcacggtcgaagcgttggatctggcaacttaccaacaacaattgacggctcaagggttagacgaacaaacggtcgctatcatggggatgttgcaaaaattgattcgagataatcaattagccaacacgacggatgatttagcaaccgtcttaggtcgaccagcacctagcttaaaaacgttagtccaaacggtcattaaggaacaagcctaaagatgcgctattcacatcaattaagtgatgccgtgcatattctaacctatctcgcaatttatccggatggcgatttatcgagtcaacggattgcgggtagtatcaatgctaatcccagcttagtgcgacgcttgatggcgttgttgagtaaggcggggttgttgaattcacgagcaggtgttagtcaaccgagtttagcccagccggcggatcagataacgttattgatgatttatcaggcgttagaagatgcaccgcctttgttacacgtcgatcctaaaaccaatccggattgtgtggttggtggtaatatccaagagacgctgagccaagtttacgccgacgttcaaacggctgctgaacaacaaatggcgcaagtcacgttagccgcgattatgggtgatattttagagagacaagcgtctaaacctcgagcataacctaagaagggcaattatggtgaactgaccatgattgcccttctgtcgttaggcggagaggtttgcttttgatatcagaacacaaaaacttatgtcgcagcctcgtttttttagctggattggctagggttaatcaagaccatcaagtttaaaatttttcaatattttaaaaaaattccaataagtttcctttgattacggggaaacctatgctatgctttaagctgttaatgaaccggagttcgctattagcaacaatcaacagctaataggcatcaatttaaatcgagaactctgtcgaaaggagtttgtccatggcaggcaaaaatttagtcattgtagaatcacctgcaaaggccaaaacaatcgaaaaataccttggtcgtaattataaagtagttgcgagtaaaggccatatccgcgatttacccaagagtcagatgggtgtggattttgaaaataactatgaacctaaatacatctcaattcgcggtaaaggcgataccattaaagaattaaagaaacaagcaaaaaaagcggaccatatttttctcgcagccgatcccgatcgtgaaggggaagccattgcgtggcatgtttcgcatatcttaaaattagacccaaccgaaaaaaatcgggtggtctttaatgaaattaccaaagaaaccgtcaaaagtgcctttaaaacaccgcgtagtatcgacatgaaactagtcgatgcccaacaagcacggcgggtgttagaccggattgtcggctattcaatcagtccattactctggcaaaaagttaaaaaaggcttgagtgctggtcgggtccaatcagttgctttgaaactcgtgattgatcgggaaaatgaaattaaagcgttcgtgcctgaagaatactggtcactagatgcagaattcaaaaagggtcgcagtaagtttgcggccagcttctatggtttaaaaggcaagaaagctgctttaccaaacaatgaagcggtccaagcggttctgaaacaaatcgataaagaagcggcctttacgattgaagacgttaaaaaacgtgaacgtaaacgattcccagccgcaccgtttacgacaagttcattgcaacaagaagccaaccgtaagttaaacttcagaacccgtaaaacgatgatgcaagcccaacaattatatgaagggattaaccttggtggtaaagaaggcaccgtcgggttaatcacctatatgcggacggattcaacgcggatttcaacgggcgctaaacacgaagcgtctaaattcatccatgacgaatatggtgaagcttatgctgcgattaaggcccaccaaactaagaatccagaaggcgcgcaagatgcccatgaagcgattcggccaacgtccgtgatgcggacaccgaagagcatgaaggacgttttaaccaacgatcaatacaaaatctataatttaatttggtcacgctttgttgccagtcaaatgacaccagccatgtttgatacggtggctgttaaaattggccaaaaagatgttttatttaaagccaatggttcccaaatgaaattccctggctttaccaaattgtacgtttcttcgcgtgataaagaggattcggccaaggataacgttttacctgatttgacggtcggcgacgaagtgaagttagccaagactgatccggcacaacatttcacgcaaccacctgctcgttattcggaagccaacttagtcaaagcacttgaagaaaacggcgtcggtcggccatcaacctattcaccaacgattgaaaccattcaacggcgctattacgtgaagctcaatgccaaacgttttgaaccgacggaactcggtgaaatcgtcaatagtttgattgtcgagtttttcccagatatcgtcaatatcgattttacggccgatttggaacatcgtttagatgatgttgaaaccggtcaagaaaattggattaacattattgataatttctacaagccatttgaaaaagcggtcgaaaaggccagcgaacagattgaaaaagttcagattaaagatgaaccagctggtttcaactgtgatatctgcggggcgccgatggtcgttaaaatgggccggtacggcaagttcttcgcttgtagtcgattcccagattgtcgcaataccaaggcaatcgttaaggaaatcggtgtgacttgtccgaaatgtggtaagggtcaagtgatcgaacgtaaatcgaagaagaatcgtttattctacggttgtgatcgctatccagattgtgatttcgtgacttgggataaaccggtgggccgtaactgtcctaaatgtgaacattatttggttgaaaagaagattaaaggtggcaaacaagtcatctgtccaaacggggactatgaagaaaccgttcaaaaataaattaaaaattgaggttatcgtatgacagcaaaaccttttgtaaacgtcgttggtgctggcttagcaggctctgaagctgcttggcaaattgcgaatcgcggcgtcgatgttcatttgtatgaaatgcgaccggttaaaatgacaccggcccatcacactaagaatttcgcagaattagtctgtaccaattcattgcgggctaaccaagtgactaacgcggctggtttaatcaaggaagagatgcgccaattagattcagtgattattaagacggcggatcaaaatgccgttccagccggtggtgctttggcggttgatcgggaacctttctcagcaatggttactgaaaaattagcgaatcatgaacggattaccgtccattatgaagaattaacggcttttcctgaagggcccaccgtggttgccacgggtccgttaacttctgaaagtttagcggcgcagatcagcgcgttaaacggcagtgatgggctgtatttctacgacgcagctgcgccgattttagataaaaacagtatcgattttgatcaggtctatctaaaatcacgttatgataagggcgaagcggcctatctcaattgtccaatgacggaagccgaatttgtcgcgttctacaaagcgttaattagtgcggatgtcgctgaaatgcacgaattcgaagatgaaaaattcttcgacggttgtatgccaatcgaagtcatggcgaaacgtgggattaaaaccatgttgtttggtccgttgaaaccagtcggactcgaagatcctaaaacgggtgaccaaccgtacgcagtcgttcaattacggcaagataatgcggcggctagcttgtacaacatcgtcggcttccaaacgcatctgaagtggggcgaacaaaagcgggtcttccaaatgattcctggtttggaaaatgctgaatttgtccgttacggtgtcatgcaccgcaacaccttcatgaaatcgcctgaagtcttgttgcccacctatcaatcgaaggtccgcaacgatttattcttcgctggtcaaatgaccggggtggaaggttatgttgaaagtgcggcctcaggtttagtggccggaatcaacgcggcgaagttagccttgggtgaaacgccggttgaatttccaaccgataccgcaatgggcgcgatggcccattacattacccataccagtgcgaaacatttccaaccaatgaacgctaactttggaatttttgaacccttaaaacaacggattcgggacaaaaaagaacgaaatcaagctttggctgatcgggccttggcgagtcttgaagcgtttaagacaacgctttagtgaacatccttttaaatctctccaggcttgtggtacagtagtactattcaagcttggagggatttttttggcgttggaacaagactggttggcccggttcttacaatatttaattgtggaccggcattattcagaagaaacacaaaaagcctaccgagcggacatcaaagctttcgttgattttctaaccaacaacggcgggttaacgtcgtttaaacaagtcggtaacttagaagtccaaacgtatttaaacgaaatggatcaaaaagcttatagtcgcgaaacggtcgcacgtcggatttcgagtttacggtcgttttaccgttatctggttaaaaatgagtttttaacggatgatccgtttgaagcggtccaacttaagaagcaacaacataaattaccgcgtttcttttacgaaaaagaaatggatgcgctatttgcggccatcgagggtcaaaaaccgttggatcaacgcaaccgtgcgattttagagttattgtatgcgactggggtgcgggtgagtgaatgtgctcagttaacaattggacagattgattttgggttacgcgtgattttagtccacggtaagggcaataaagaccgttacgtgccgtttggccaccatgcggcggatgcgttacgtttttatctcgatcacgggcgaacaacgttacttgagaagcaagcaaccagtcatgatgtggtgtttgtcaatcggctgggcgcaccgattaccagtcgcgggattgaatacgtcttagaccagatcattaagaaaaccagtttaacgacggacattcatccgcatatgattcgccacactttcgcgactcatctgctggaccacggcgctgatttacgaacggttcaagaattgttgggtcacagtagtctgtcgacgacccaaatttacacgcacgtcacgacggcgcacttgcaaaaagactatcgacaattcttcccgcgaacgtaaaactcggtctaaaggttgattttttttaaatcaattaacgctagaattagcacacagccttaaagactgctaaaatgacattaacgcaatttaaaggagctatttaaatgacaacaatttgtgcaattaaacataatggtaaaacggcgattgccggtgacggtcaagtcacgatgggtgaaaaattcgtcacgaaggattctgctaaaaaggtgcgccggatttataataaccaagtcgcaatcgggtttgccggtggcgtcgctgatgcgtttacgttacaagaatggtttgaacaaaagcttgaaaaatattctggtgatttgcaacacgccgcggttgctctagcgcaagactggcgtaaagatccaactttacaaaagttagaagcgatgttaatcgccgtgaacgaaaaggatattctattgatttctggtaatggtgaagtgattacgcctgatacattggctgaaaccggcgatcaagtgattgcagttggttcgggtggtaattttgctcaagcatcagcaacggccttgatgttaaagggccgttctgaattaacggttgaagaaatcgctgaaaccagtgttgatattgcgggctcaatcgatgtttataccaaccataatattattgtggaatcattctaggaggcagacaaatggacttaatgaataaaacccctaaatcaatcgtgaccgaacttgatgaatttgtcatcggtcaggatcaagctaaaaaagcggtcgcggtcgctttatataaccgctatcgccgaatgcaattgagcgaaaaaatgcaacaagagattacgcctaaaaacttattgatgattggaccaaccggggtcggcaaaactgaaattgcccgccggttagccaaagtagtggatgcgccttttatcaaagttgaagcgactaagtttaccgaagtagggtatgttggtcgtgatgtcgaatcaatggtccgcgatcttgctgacattgccgtgcacatggaagaacaagaacaattcaaaaatgtgcgtggtaaagctgctcgtcaagcggataaacgcttggtgaagttactcgtgccagggattaaaaaagaacaacgtaaaaatgacaaagctggcatcaacgatttgatgggcatgtttacggccttgcaaaatggcgaaacgccggccggctttggtcaaccagaacccgaagaagtgactgatgacgttcgtaacgaacggctatccgttaaagaacaactcgacaaagggttgttagacgatcgtgaaattgaaattcaagtggatgaacctaaaaaagcagcaccaatgaacgatatgatgggtcaaatgggcatcgatttaaacgatactttaggctcaattatgccgaagaaaaagattacacgcacggtgacggttaaagaagcacgtgaagtctttattcaagaagaatctgataaattggtcaaccatgctgatatttatcacgatgcattgcaaagagccgagaataccggtatcatctttattgatgaaatcgataaaattacggctggtggcaagaaacaatccggcgaggtttctcgtgaaggggttcaacgtgatattttaccaatcgttgaaggctcacaagtcaatacgaagtacggcatgttgaaaacggaccacatcctctttatcggttccggtgcatttgccgaatcaaaaccaagtgatttgattgctgaattacaaggtcggttcccaattcgggttgaattacaagatttaactgaagccgattttgtccggatcttaaccgaacctagtaatgcgctggtgaagcaatatatggcgttgatcggtgccgatggcgtgcatgtgacttttacgatggaagccattcaacggatcgctgcgattgctttccaagtgaaccacgataccgacaatatcggtgcgcggcgtctagcgacaattcttgaaaaattattggaagacattttatttgaaggtcccgatatgcaaatgggtgacatcacgattacggaacaatacgtcaatgataaaattggcaagattgttgctgacaaagatttaacccgatttattttataatagttaaaggtggtagttaataatggtccaaatcgcaaatgaatttttaaccgttgaaattaatcccctcggtgctgaactgacgagcttaaaaggcaacgtatcaggcttggaatatctctggcaagcagatccagctgtctggaaacggcatgcgcccgtattattcccgtttgttgggcgttctaaaaacgatcaatatacgtatcaaggcaaaacatatccaatggggcaacatggttttgcccgtgatcgtcagtttgaagttgaagaaagcggtgatcaaaaagcggttttcttactgaaatcagatgaagtcagtttagccatctatccgtttgaatttgaattgcgggtcagctatcaggttcaagacatgcatttagtggttaattacgatgttaagaatacagcgacaacggccccaatgtacttttcaattggcggtcatccgggctttaaagtgccaatgacggccgatacgcaatttgacgactattttgttgattaccgtccacaaaaatcgcgggttaagattccattgcaaggggcgttcattaatttaaatgaacggactttggcaccaaccgatgtcgcaaccgatatcagtcacgatcttttcaaagatgatgcgatgatttacgaattaaagggccaagaaaacgtctttagcattcgttctgaaaaaacaccgcatgcaatctcaatgaagctatcagcaccgtttatcggtgtttggtcgccacacccaacagagggcaatcttgtttgccttgaaccttggtgggggattgcggatgatgttgctgcaaccggtgaattatctgaaaagtttggtgtcaatcaattagcgccacaagcgacttttaatgcgaattatgaaattacggttaaatagtttgtgaatttgttctaaaagcagtcctttttttagggctgctttttgtttgtttacgggttttaaagcattttcaagtgtgaattatttgatttcacaaacatcactagtttttaaagaactggcgtgctaagatattagtaatcaaccaatagacgggggcaaattatgactgaagataaaaagtactatggtgcggatgcaattgtagacagtttagccaatcatgaaattgaatatgtttttggaattccgggtgctaaaattgatcgcgtgttcgagcgattagaacacccagtcaatccgaaagcacctcgattgattttggcgcgccatgaacaaaatgcggcttttatggccgctgggattggccggattacggggaaacccggcgtagcgattgcgacttctggtccgggtgccagtaatttagcaactggggtcgtcacggcaacggctgaaggcgatccgatgattgcgattgccggccaagtcaaacgggctgatttattacgtttaacgcatcaaagtatgaagaacgcagccttattcgcaccgattactaaatttagtgcagaagtccaagaaccagaaaatttatccgaagtgatcgccaacgcttatcaagaagccgaatcggctaaacaaggggcggcttttgtcagcattccgcaagatgtgacggattcagaagtccatgctaaagtcattaaaccgttgatggccccaaaactcggacctgctagtccggttgaaaccactttgttggcccaacggattaaagaagcgaaattaccggttctgttagttgggatgcgggcctcttcacctgaagtgacggcggcaattcgcaatttaattgcagaaacgcatattccagttgttgaaaccttccaagctgccggaattatctcacgtgatttggaaactgatttctatggtcgggtcggattattccggaatcaaccaggggatcaaattttgaaacgcagcgatttagtgattacaattggttatgatccgattgaatacgaaccccgtaactggaacgctgagagtgacgcgaacatcatggtgattgatgacatgcgtgctgaaattgatcataatttccaacctgaaaaagaattgattggcgatatcgcccaaacgctcgatttcttattgccttacatgaaaggttatcaattatctgatgacgttcgggaatatttagtgaaacaacattctgtgattcatcaacgtgatgaggcgccagtcgcattagctgataatccactaagtcatccgttaaacattgtgtctgaattacaagcgcgggtcacggatgaaatgaccgtcacggttgatgtcggaagtcattatatctggatggcacgccatttctggagttacgaaccccgtcacttattatttagtaacgggatgcaaaccttaggggtcgcgttgccttgggcgattagtgcggctttagtgcggcctaatacgcagattgtctcggtttccggtgatggtggtttcttattttcaagtcaagaattagaaacagccgttcgcttgaatttaaacatcgtgcacgttatttggaatgatggttactatgacatggttaaattccaagaagagatgaaatatggtcaatcggccgcggttaaatttggaccagttgatttcgttaaatatgctgaaagttttggcgcaaccggcttgcgggtcgataatgccgctgaattaggtgcggttttagatcaagctttcgcaactgacggtccagtgattgtcgatattccagttgattacaaagataatcaattattaggccaagcattattaccagatcaattagtttaattgggaggttcacgaacatggcacacgattcaacacgggtttatcaacacgggacgttagcgttactcgttcctggtttatttacgggtacgcaatccgttcatgatttattacaacatggtgattttgggattggcacggcgcacggtttagctggcgaattaatcgtattagatggtcaagcttatctcgttgctggcacgggtgacgttcgcccggtcaagacgactgaaacggtgccgtttgcgacggtccattttcaagatgcggcgttaacgagtcaaaccattagtggcatcactaaaatggctttagaacaacaattgttaaaccaagcaccgcttaagaatttattttttgcggttaaaatcacgggtcaattcaaaaagatgcatacgcgcgcggttgaagcgcaggttgaaccttatccgaatctaacggcggccacccgcgtccaaccagaatttacggctgacatggttgaagggacgttagtcggctattacgcaccagcgttataccaaggggcggccgttgccggttatcatgtgcatttcttgaacacggcgcatgattttggcgggcacgtgttagattacgaagtagcggacgcgcaattaacggtccaaccgtttgaaacgttcgaacaacatttccccaatcaaaatgcggctttcttagaaaccgattttgatttgcacgccgttaacgcggatattgaagaagcggaacactaaaaaatgagtgtgttgagttgctgcaacacaaaagcacgttaaaaaaatgagtgtgttgagttgcgggtagcaactgagcattaacagaaaatccccccattatcttgattttaagataatggggggattttagggtaagtggaagttgttgtcatttaattgacgtgatcgaccgttgaatcagcgaaatcaaggcccatctgttcgagaataatagtggccgtttcttcgattgaccggttggctacattgatgacttggcagccgattttatcgtagaggtcttgggcaaaggccaattcagctttaatttcatccatatctgaataggtcgtgtcaggatttaaaccgtacgcaatcatccgttcgcggcgaatgttattcaaaacttcgggtgaattcatcaaaccaatcacttttttaggatcgacatgccaaatttcatccggaatatgcgcctgagggacgattggtaagttagcgactttgaggttccggttagctaagaataacgacaacggggtcttagacgttctagaaacacctaatagcacgatgtcggcctctaagaagcctttcggatctttaccgtcatcgtacatgacggcgaattccatcgctgaaatccgatcgaaatagcgatcgtttaagtggtggagggcaccagcttcgccagaaggttgtaattcagttttagcggtaattaattttgtgaccggggacatcatatcgaaactagcaatttgattggtttggcaataggtttcagcaatgtcagcgagttttttagtggctagcgtatggacgacaatcgtttcggtcgggacagccttgctgagcacatccgtcagcttgtcggccgtgtgaataaatggaaaacggacaatatccggttttaaatctggatattgcgccaaggctgcttgcgccaattgtaaggcagtttgaccaactgaatctgaaattacaaaaagcgttaatggcgttgattgtgtcatattaagactcctttgaacatttttatagcgttatcataccataatcgactaaaaatagagaataattgaaaaaagattcaattaattagcaatgagttattgaccgtattttcaacattcgctataatagctaagaacggtttaactcgtcgcaactagttgtcatgattaaacggttatacttagcacgcgaggggagggatatcatatgggcaagacagtcgttcgcagtaacgaatctctagatgatgctcttcgtcgcttcaagcgttccgtatcaaaagctggtactatacaagaatatcgtaaacgtgaattttacgagaaaccaagtgtaaaacgtaagttgaaatcagaagcagcaagaaaacgtaagaaattctaatttctcgtaaaggaaatgattgaatgagtttacttgaacaattaaattctgatttgaaaacggcgatgaaggccaaagataagttgcggttaacagttattcggagtttaaaatccgctttaactaatgcacaaattagtgctgggcaagacttatcttctgatgaagaattaagcgtactatcatcacaacttaagcaacgcaaagaatcgctacaagagtttgaaaacggtgatcgtgcagatctcgcggatcaaacaaaagcagagattgtaattgtgactgcttatttaccagaacaacttgatgaagcagcggtaaccgccattgttgatgaagcaatgaaggctactggggcaacaggtaaggctgattttggtaaagtgatgcaatatgtaatgccgaaagttaaaggacgtgctgatggcgctttggtcaatcaagtcgttaagtcaaaactgaattaatttttggtaggcctcgaaagaggcctatttttattgttttttacataatggcggggtgccaacctttgaaacccaatatttaaagcgaattatgagggaaactcgtgacggatgaagccttgctatgatagaatgaacgtagttttcattctgtagatagtcatttattggtttggggtgcgtcagataatcaaaggcggccctataaattgagaatagaagaaagtgggaatttagcaatggatattcaaattgttgatgaaaccaaacaagtaccagaagcgcaaattaaattagtgactgatattttacagtttgcgggtaaagaattaaaactggctgatgacacagaaatgtcagtgacttttgtcacgaataatcggattcaagagattaatcgtgaataccgagatactgatcgcgcgaccgatgtgattagttttgcgattgaagaagatcccgaaggcgaaggtctaccagcgaatttcgaagaattattcgatattcctaagaatattggtgatttgttcgtctcacctgaaaaggcggctgaacaagcgaaaacctatggtcattcttacgaacgtgaactgggttatacgatggtccacggtttcttgcacttgaacggctatgaccatattcacagtgaagacgaagcccaaatgattccattgcaggagactatcttagatgaattcggattacaacgctaaaaaaccgcagaccaccaagaataaatccttttaccaatcagtccgacacgcgttagtcggcttggtgaccggttttaaggaagaacttaatttacagcgggatttaatgatggcggctttagcgattattttagggattatctgtcgcttgcactacatcgattggctgtttctgattttagccatttttattgtattactagctgaattctggaacaccgttgttgaacatttcgtcgatttgttggtggaacaccaatttaatccgaccgctaaaaagattaaagacatcagtgctgccagcgtgttattgagcgcggtgttggcacttgtgattggcgccgtcgtttttggccacgccgtattaacttatttgtaagactaaactatagcaataactaaggggaacactatgacagatacttatcgttcaggttttgtggcaattgttggccgtccgaatgtcggtaaatcaacatttatgaatcgcatgattggtgaaaaaatcgccatcatgtcagctaaggcgcaaaccacgcggaacaagattcaaggcatctatacggacgaaaacgcgcaaatcgtttttgttgatacacctgggattcacaaaccacacaatgaattagacgaatacatggatcaagccgctttatcaacgtttaatgaagtggatgcgattctattcatgatcagtggcgtcgataaaaagggccctggcgatcaatatattatggatcaacttaaaaacgtgaaaaaacccgtttatttggtggttaacaagattgatgcgattcatccggacgacttactaccattgattgaacaatatcggcatgaattggattttaaggccgtttatccgatttcagcactagagggcaataatgtcccagaaatgttggcggaactcgaacagaccttaccagagggcccacaatactatccagaagatcaattaacggatcatccagaatatttcgtcgttggcgaattaattcgtgaaaagattctagaattaacccatgaagaagtgccacattctgtcgccgtcgtggttgaacgaatgaacgaacgggtcaatgataaattacaaattgaagccaccatcgtggttgaacgtgatggtcaaaaacgaatcgtcatcggtcaaaaaggtgcgatcattaaagccgttgggattcgttcacgacgcgaaattgaagcgttactcggtgaaaaggtcaacttgaaactatgggttaagattcaaaaaaattggcgtgacaataatcaatatttacgtgaatttggttataacaagaaacgtttgtaggctaaactatggctgaacatcgtttcgaagattttaacggcctcgtgatttttcggcggaactacaaagaaaaagatatgttggtcaagattttaaccgaccgtttcggtaagaagatgttttacttacgcggggccaacagtccgcgttttcggatggcggcggcaattttgccgtttaccaaagccgaatacggtggcgatattcgcgatgatggcttgtcgtttttgaataacgtgaagtcggctagtcaatttcaagcgattagtaatgacctgttcttaaacgcttatgcgacgtatattttgaatttaatcgacgtcgcgtttccggatagccaaccgctggggttttggtatggtcggattgaacaagctctgacgctaatcgatgagggctttgacgcggcgatgattactcacattatcgagattcaactgttgcaagtcttcggggttcaaccgcatctcgaaagttgtgtcgtctgtggccgcaccgatttagcgtttgattattcggaaagctatggtggtttgttgtgccagcgtcattggcatttagatccgaatcggctgcacgctaattcacgcgccatttattatttacgcctgttttcagtgattgatttgttcaagattcaatcggtgacggttaaaccggaaactgaagcggccttgaaagcgattgttgatcagatttatcaaaattcagtcggtttggtcttaaaaagtaaacaatttatcgataaaatgtttacttttgacagtgcgatgccgaagttaaaaaaagttgcactagaaattgacaggtcgtctaaagacgactaaaatagtaatcaacttaatagacgttgaagaaaagggtctacttgaacaagcaaacagtgattctaggagagtgtgaactaggacgagtttcaagtagattggcatttcggagtcataccaatgaagcagcagctttctttaaagctgaagtagggtggaaccgcgagcaatcgtccctatgtgactaactgtcgcataggctttttttatgcgtaaaatgacggaaaagaggaagaaaaatggttaaaaagcttaatgttcaagaaatgattttaaccttacaacgtttttggtctgacaaaggctgtatgttaatgcaatcatatgatactgaaaaaggggccggcacaatgagcccctatacattcctacgggcaatcggaccagaaccttggaatgctgcttacgttgaaccctcacggcggccagctgatggacgttacggtgaaaatccaaaccgtttattccaacatcatcaattccaagtggtcatgaaaccagcaccattaaatattcaagaattctatttggatagtttacgtgcgcttggaatcgatccgttagaacatgatatccgtttcgttgaagataactgggagaacccttcaatgggttgtgccggtgttggttgggaagtttggttagatggcatggaagtcagccagtttacttatttccaacaagtcggcggtttggcttgcaaacccgttaccagtgaaatcacatatggtgttgaacggttggcgtcatacattcaagatgttgatagtgtctttgatcttgaatggggtaacggcgttttatacggcgatatctttaaagaacctgaatatgaacattctaaatatgcctttgaaaatagtgatcaagcgatgttgcttgaattctttgatgattatgaaaaagaagccaaacgtttaatcgacttaggcttagtacatccggcttacgattacgttttgaaatgtagtcatgcgtttaacttattggacgcacgcggggcggtttcggtcactgaacgggccggttatttatcccgcattcgacggatggcgcattcaattgcccaagcttttgtggctgaacgtgaaaaattaggcttcccattattaaaacatgcgcaagaaaagatggaggtaactgatcatgactaaaccctttttattagaaattggtctggaagaaatgccagcccacgttgtaatgcctagcattcaacaattggaaaaacgggtgcgtgctttcttaaccgaacaacatcttgaattcggcgctttaaaaacatatgcgacaccacggcgtttagcgattttgattgaagatttagctgaaaaacaagcggatattcatgaagaagctaaaggtcccgccaaaaaaatcgctttagatgcagaaggcaattggagtaaagcggcccaagggttcgttcgcggtaaaggtctaacgactgatgatattacttttaaagcattaaagggcgttgaatacgtctacgttgaaaaatcaattatcgggcaacccgttgctgaaattttgccggggttaaaagacgtcttaatggcgatgaccttcccaactagaatgcattgggctgattatgatttcgaatatattcggccaatccattgggtgattgctttattagacaatcaattgattgattttagtcttctaaacgtcacaactggtcggacaacacaaggtcaccgtttcttaggccaaccggtaactttagaccgggcaacggattacgaagcggcgttagaagcgcaattcgtcatcgccgatgaagtgaaacgtcaagcaaagattaaaatgcaaatcgaagccatggcgactgccaatcaatggcaagttgatttggatgccgatttattagaagaagtcaccaacttagttgaatggccaactgctttttatggccaatttacgccgaaatatttggaaattcctgaagaagtgctgatcacttcaatgaaggataaccaacgctatttctacgcacgaaatcaatcgggcgacttattacccatctttatcggggttcgcaatggtaacgaacaacatctcgataacgtgattgccggtaatgaaaaagtgttaaccgcgcgtttagaagatgccgatttcttctatcaagaagatcaaaaacaatcgatcgcggactacgttgaacaattagccaatgtgtcattccacgataaaattgggagtatggctgaaaaaatgcaacgagtcgggattattgcgcaattcttaggccaaaaatttgggctatcaacgaccgaattaacggatttacaacgcgctagcgatatttacaaatttgatttagtgacgggcatggttggcgaattccccgaacttcaaggggttatgggtgaaaaatacgccttacttgaaggcgaaacaccagcggttgccacggcaattcgtgaacattacatgccaattagtgcagaaggggcgctaccaacgactaaagttggtgccgttctagcgattgctgataagttcgatagtattgctgatttcttcgccgttgggatgattccaagcggttcaaacgatccatacgcactccgtcgtcaagcttacgggattgtccgaatcttagctgcccaagattggcatttcccaatggcgacttatcaaaccgaattaacgacggccatcaaggacaagcaagctggcttcaaattagattggttgaagaatcgtcaagcgattggtgaattcttaacggatcgggttcgtcaacgctttaacgggctccaacgtaaaccacgccgcgacatcatcgacgcggtcttgaagaatcaaaagcaagatccaatcacgatgttccaagcggccgatgtgttggatcaacataaagccgatactgattttaaagccacgattgaagccgtcactcgtgtgttgcggttagctgaaaaagctgattttgatcaaaccgatttaacggttgatcccgcattgttcgaaaaccaagctgaaaaagacttgtatgttgcggttgaagcattgcgcggacaagtcgctaataatccgcttgaagccaactatgcagccttacaaaacttgcgaccattgattgaagcttattttgaagcgacgatggtcatggctgacgatttaaccgttcggaataatcgtttgaaacaattattgattattgcacggattgcctttagtttaggcgatttaaacgaattgattgttaaataaattaacaagaagatgattgtatgttacagatgaaacgtgtttatgaagccgccaatccggccgatggctatcgcattttggtggatcgactttggccgcggggtgtcgctaaaacaacggcgcaattagatgactggaataaggcgattacgccgacgactgaattacgccgttggtttgaccatgaacccgctaagttttcggcatttaaaacccgctatttagctgaaattgccgataatcaggcttggcccgcatttgaacaacaaatccgccaacaattagcggtcggcaacgtcacgttggtctatgctgcgaaggatcctgaatataatcatgtggtgattttattagcacttttaaaaaaggtccttgacagttagctaagatgtttgctatatttgtttgcaactatatctaaaacgtgctatgctgtatagtgtatttttgtgctgataatccgtagaagtcgcatttcattgtgaggtgcggcttttacagtcttaggtacaatttgataatgtgaggtgagaccaatggcgagtaagattccagaagaagttctcgatgatattcggcgccaaaccaatattgttgatgttgttggtcaatatgttcaattaaaaaaagccggcaagaatttattcggcacttgtccgtttcatgacgaaaagacgccctcgttttcagtcaacgaggaaaaacagatttttcactgtttctcgtgtggccgtgggggcaacgtctttaaattcttaatggaaatggaacaattaagttttccagaggcggttgctaaggtcgctgatttcgttggtgctgacctggcaagtacttttcgacccgttcaagggagtcgcgaatctagtgaagttgtggcacttaaacagctttatgaagaagccagtaagttatttaaacatgttttaacgagtaccgttgcgggtcaacccgcgttggattatctacaccaacgggatttaaccgattcgttgattgaaacctttgatattggttttttaccgaatcaaggcgatttattattaacgttcttccaaaatcgggagattgactatcaaacgttacgtcaatcgggtctgtttgtggaaacgcaaaccggtaaattacatgatcgcttctcaggacgggtcatgtttccgattcggaacgcacagggtgctgttattgcattttcgggacgggttttacaagcgacaccggatcaaccgaaatatttaaatagtccagagacgccaatctttaataagcgcaaagtgttatttaatttcgatttagcgaaagcaacgattcatcaagataagcgcgtctatctgtttgaaggcttcatggatgtgattgccgcgttttctgcgggaatccaaaacggcgtcgcttcgatggggacgagtttaaccagtgaacaattaagtttactgacccaccaagcgcaagaattggtcgtttgttatgatggcgatcagcccgggattgaagcgatgaaacgggcgattggcttgcttggtcaacattcaactttggaattaggggttgtcgtgttgccgagtggggccgatccggatgaatacgtgcgtcaattcggtgcggaacaatttcgcgaaacattgcaaaaaggggttgaaacaccgaccgcttttgaattacgttatttaaaacaggggttaaatttaaccaatgaaaaagatcaattagattatgtgcaacaagctttggccgtcgtggcccaaattgattcaccactcgaaatcgaggtttatcttaagcaaatcgaagaaaccagcggtatcaccattgacacgttgaaacggcaattacagacggtacgggttaaaaacgtcaccagtcaaccgttgcaacaatccgtgcaacgcgggggtcccgatagttatgatgaaccgccaatgttagttgatgaggctgccatacccgttaatcgggggaatgcgccgcaacaacgacaagtcaaacggctatcgaaaatcgagcacgcggaacaagagattttacacatgctgatgcgccatgaagatgtacgcttacagttggagaacaacgctgattttagttttgtccacacgccgtatcaattgatttatgaattgtggcgcgcgtatttagacgaaggacacgttgctgatatcgcgggatttaccacttatattccggatgatctgcaaagcttggtgattcaaatcgacttgttggcactacctgaagaggctaatcaagaagcgttaaacgattgtttatacgtgattggtcaaaattcggttcaagaacaattaaaaatggcaaaaattgctttaagtgaagcgagaaaattgggcaaccaggatgaagaattccggttaactctagaagtaatacgacttattgggaaaatgcaataagttatttaattaggaggtttctgcatggctgataagaaaaaagctgatactaagaaatttgatacggcggttaaagccttaattaaggaatataaaccaaaaaaagaaatcaccaatgatgaattggttgctaaaattgtgaaaccttttgctttaaaatccaaagaaacaaatgagttaatgcaaaaagtagaagatcaagggattagtattgtcgatgcagacgggaaccctagtgtcgcaacgctcaaaaaagaaaaagtctccgctaaagaattaaaagatatgacagctccgactgggattaagattaatgatccagtccggatgtatttgaaggaaattggccgtgtctctcttttgaatgctgaacaagaagttgaattggcgttacggatcgaaaagggcgaacaagaagctaagcaacgtttagccgaagccaatttacgattagttgtttcaattgcgaaacgctacgtcggccgtgggatgcaattcttggatttaatccaagaagggaacatgggtttgatgaaagccgttgaaaaatttgatcaccgtaaagggttcaagttctcaacttacgccacatggtggattcgtcaggcgattacgcgtgcgattgccgatcaagctcggacgattcggattccagtccacatggttgaaacgattaataaattaatccggattcaacgtcaattactccaagatttaggtcgcgaaccaacacctgaagaaattggggccgaaatggatatgaataccgataaggttcgtgaaatcttaaagattgcgcaagaacctgtctcacttgaaacaccaatcggggaagaggacgactcacacttaggtgatttcattgaagatcaagatgcaacgagtcctgaagaccacgcttcttatgaattgttgaaagaacaattggaaagtgtcctagataccttaacggatcgtgaagaaaacgtcttacggttacgtttcggtttagatgatggtcggacacggacccttgaagaagtcggtaaagtcttcggtgttacccgggaacggattcgtcaaatcgaagccaaagcattacggaaattacgtcacccatcacgttcaaaacaattaaaagactttttagaataaaagagtgctaatttgaatgggtcaggctttgaggattaatatagaaatggtgctgttggttgctcttaaccgacagcgccattttttattaaccgcagaaggctattcaaaggagcacgtttaatcagaatcaatcgagtactaaactgaaaataacattatccagtttttggataatgttatttttgatttagacggagattgatgagtggggtcgcgtgatgaattgactagcccacgccaaagtcgcttaaatttggtatactgaaagtattataaatcaaagcagaactggggttttattttgtcaggaattcatttatctaagcgactcgcaacggttgcccaatttgtaccagaaaatagtcggttggccgatatcgggtcggatcacgcctttttaccgatttatttaagtcagcagaaacggattcaagccgcagtcgctggtgaagtcatcacgggccccttcgagattgcccaccaacacgttcaaaattatgggttgcaaaccaccatcgatgtccggctgggtgacgggctagaagtcctttcgccaactgatgatgggattgattgtatcgtggttgccggcatgggtggtttattaatcaccgaaatcttggaacgtggccaacagcatttaaacgggcatgaacgtttaattctgcaagccaacattactgaaccggctgttcgcgaatggttaatgaaccatggttatcaaattattgatgaggacatcgtggctgaagaaaatcatatttatgaggtgattgtggctgaaccaaccgtgacaccagtccgttatacggagagtcaattattgtttggcccagttttaatgcaaaaacaaccaacggatttcatcacgaaatggacgcagatgcggaccaaacggcaacatctgttagggcaattggaacaagcgcaaagcgcacccgtcgctaaagttcaagaggttcaacacgagttgcaattaattgaggagatgatggcaacatggcaatgatgatcgccgctgatttaatccgcgcaattgaaaattacgcaccgctagcgttaaaagaagaacacgatccaaccggttttcaaattggtcgccgggataaagtcgttaaacgtgttttagtgacgttagacgtccgcccagaagtcgtgcaagaagcgattgaccagaacatcgattttatttttgcccaccatccagtgatgtttcggccggcgcgaaatttagatttagcgattccccaaaatcaaatgtacgctgatttgattcggcatgatattacggtttatgccgcccataccaacttggataaaacccaaggcgggatgaatgattggttggcgaaagctttgcagttaaccgacgttgaaccatttaacgtgaccagttacgtcccaatggctaaattggtcacgttcgtgccggttagccatgagaagacggtccgtgaagctttaaatcgggtgggtgctggtcgcattggtgattatactgactgtagcttcagttcaactgggactggtcgtttcacaccggccgcgttagccacgccgtttatcggccaaaagaaccaagcggaagcagttacggaagttaagctggaagtcacatttccccaaagccaagcgccacaaatgattgcggcgctgttggcggcccatccgtatcaggaaccggtttacgatttaatttcgttggcgaatcaacaacaaccaatcggaattggtcgcattgggcaagctgcaacgccgatgacggttcgcgattatgcgcaattcgtctgtgagacctttgatgttgcggggttacgtttgatttcgaatacacccgataaagtggttaagcgtgtggcaatcgtgggtggcgacggtggtaaattctatcccgccgcaattcaggcgcacgccgatgtctacattactggcgatgtttattatcatacgggtcacgatatgttagcggatggtctgtcggtcattgatccgggacaccacattgaaagtattgttaagacggaaatgagccgaatatttgaacaatgggctcaagaaaacgactggcaggtcgaaattattaaatcttggcaaaaaactgatccgtttacatttatttttaatgcgaaataagttagaatagtattagtgttaaataatatctaggaggctacaccatggctaaatatgaaaaattgattccgcgttttctagaatatgtacaaacagaaactcgttccgacgaaaacgcaacaactagtccatcaactgaaacccaagtggtttttctacacaaattgatgggcgatttaaaggaaattggtttaagcgatgttaagtataacgaaagtaatggttatgtcacagcgctattaccaagtaatattgataaaaaggtcccaacgatgggcttcttatcacacattgatacagctgatttcaatgccaagggtgttaatcctcaaatcgttgaaaattatgatggcgaatcaatcattaaattggacgccgctggtaaattcgtattagatcctagcgaattccctaacatgaaaaattataaaggccaaactttaattacaactgacggttcaactttattgggttctgatgataaatcaggggttgctgaagtcattaccgcaatggattatttaatccaacatccagaagttaaacatggcgacatcaagattggcttaggacctgatgaagaaatcggcactggcgctgatcactttgatgctaaagactttgccactgattttgcttacacaatggatggcggcccaattggtcaacttgaatatgaaacttttaatgctgctagcatgaaagttgatatccaaggtaagaacgtccatcctagtgaagctaaagatatcatgatcaacgcattgcaaattgccgttgatattcaaaatgcttttcctcaagatgaagtccctgaaaagactgacggtcgtcaaggcttctaccatctattgagtttagatggcacagttgatgaagcgcatatggcttatatcattcgtgatttcgaacgtgatggtttagaaacgcgtaaagcattggctgctaaagtcgctgaaaagatgaacgctaaatacggtgaaggccgtgtggttgcgaccatcaaagatcaatattacaacatggctgaaattcttaaagatcacatggacgtggttaacttggcaaaagatgctatggaagctatcgatatcaaaccattaatcgaacccgtacgtggtgggacagatggttctaagatttcattcatggggattccaacaccaaacgtctttgccggcgctgaaaacatgcacggtcgctacgaattcgtttcaatcgaaacgatggaaaaagcggttgatacaatgttgaagatgaacgacttaaacgttgaacgcaactaattaattgaagataggacctaatccgttgttgagggttgggtcttattttaatgggaatcagtggggatttatatgctaattaacgaacggaagattgatcaaactaattggcctcgaaaagaattatttacctttttttcggcggaccaagaatcacaattatatgaaattaccaaccagattgacgtgactaatttatatcagtttgttaagcgagaagatatttccttttattatgcgttaatccagttatcgacgacagcgttgaatcgcattgagaattttcggtatcgtattcggggtgctgatgtttattgtttagcgcagttaacgcccagttttacgacgttacaacctggcagtgaattatttcaaataacgactgtcgattatgtgaccgatgtgattcaatttgcacaacaggctaagttgatcagcaatcaccaaacgacgatgatggcgtttggtgactatcagccggatcaattggttcaattttcgtgtttaccgtggcttcattatagtagttttaacatggaacgtagtccggatttggctgattcagttcctaaaataacatggggtaaatatgagtcggttgcgcagcgcttgaggttgccgtataccattcaagtcaatcatcgattagtggacggttaccatctgggtttatttttcaccgagttacaaacgctgattgatcagttaccaaattagaaatcaaaaaaatcccgacaaaagtttgcgcttttgccgggatttttgggtgattatagtaaactttttaattggtcaatcggtaattggccaggggcgcttggtgtctcgagataaccaaacgttagacaacagccaaactggccaccaagaattcgggaagcttggcccaattctgacatcgccatcgtaattaatggatgcggatcttgttcagtgaattggcgcgtgacgtctaagagacgaatcgtgtcatttttagtttgagcagtcgtcgctagcttgacgatgtcaatcgccggttcgacagccattgcggctaattcttgttgtaaaatcgctgttggcttagtcgcgactaaatcgtgttggcttaaaatcacctggtagcctgcagtttgtgcgagttgacctagactttggcgcgttgcgagtggaacgtgccattcaaggtcaattagttggccgatatgctgtttgattaacgtttgataaagcgtttgataggtggctagattaccgttaaattggccgccgtcatgtttagtacgaattgtcagaatcaatggccgatcaatttgattaatgagttgtgccgcggttagtagatcagccggcacttgccaagcatctaaacgccattcaacgaaatcgatggcgcttagtttagcggtaacttgttgaatgagtctgtgacaatccaccaaattttggggactgattgaaacggcggtttggattgtgccggttttaagtacgggttcgtgaacatttagagtcatctgtatgacttcctatcctttttaatagttttcatgaaaatcttttttaagctaaattaaggctcgtctttattttagcgaaagaatcgggaataggcaatttaaagattaatgggcgttaaatagtgtagccccctaatgaattctaaaaagggatttaaaaaataagcaaattacagtatgatagtgggtagaggtattcgcaatgatatcaggtcagacagctctttatggactagttgcacatcctgcgcgacatagtttatccccaaaaattcagaaccaatggttttcagaaaaacagattgatgcacgttatgtcgcctttgatacccaagcaaatgctcgtgaagtggtccaagcgattcagacactcgggattgccggcgttaatttatcgatgccctataaacaagcgttgttaccgttgatcactgaattaagttcaacggcccaattgattggcgccattaatacggttaaaaatcaaaacggttatttaagcgcaacttcgactgacggtgccggtttttggcaagcctttaaacgggccaatcctaaccagatagttcaacagctagttgtgctgggggctggtggtgctgcgctagcggtaatcgaagcggccggtcgagcaggcgtgcaacaggtgaccgtttttaaacggcaaaatgcaacttttgcgcaggttcaagcgcaattacaagcgattggtcgctatcatgatttaacgattgaagttgtaccctatgaagcaactgcgctgatggcgactgctttaaaaacggctgattgtgtggttaacgccaccaatattggcatggcgctaacgcctggtttaccaatcgaatcatcactgattgaccagattaagcaagaagccgttgtcgtcgatttaatctatgcgccacaagcaacggcctttttaaaaaaatgtcggcaacggcaattagtttgtcagaacggattagggatgctcatcgaacaagccgcattgagctttcaattctggacggaccaaacaattaataccacggagatgtaccaacaattaatggaggaattctaattatgattattcaatttaagacaagcgccccacaacctttaattcaagccttttgtgaccgccaaacagcggccgagaaagtcgtttatcaagtgaaacaccatgtcgctgtcatcggcgctaaagcagtcacgttaaccgatgacgaacaggccaatgttgattctattagtaatgatgatcccagtgcggtattaagcagtcgtttgttccaaccggaagatacgattattaaactaccccacactgaaatcgggggtcgtacatttacgatgatggcggggccttgttccgtcgaatcagctgaccatattatggcgatggccaaagtcgctaaagccggtggcgccacgttactccgtgggggtgcttataaaccgcggacatcaccttattcattccaagggatgggtgaagaaggcctaatcgcattgcgcaaggcggctgatgccaaccagatggacgtgattaccgaagtcatggacgaaacacatgtcgatttgattgctaaatacacggatgttttccaaattggtgcccggaatatgcaaaacttctcattattaaaagcagttggtaaaaccaacgttcccgtcgctttaaaacgcgggttagcagccaccgttgatgacttattaaacgcggccgaatacatcgccgccaacggtaatcaacaaatcatgttactcgaacgcgggattcggacgttcgataataaatatacgcggaatacgttcgatttaaacgcggtaccggtgttacaaaaattaacgcatttcccagtgatcgttgatccaagtcacgccacaggcgaatgggatttagtgacaccaatggcccgcgcgggtgtcgcaacgggcgctagtgggatgatggtcgaaattcatgacgatcccgaacacgctttttcggatggtccccaagctttgaaaccagcgacttatttgaagatgtgcgaacaagttcaagcgattcatacgttaatgcaagaatggtaggctgaccatgacagttatcgatgttcaattagtgactaaacactatcaagttaagatccaaacggcgacctcaagccagtttgggaccgaagtggccgcagtttggcaaccatgccgcatcgctttggtgaccgatacgacggttggtccgttgtatttagcccaagtgcaaacacaattaaccgcgtttggctttcaggtcttaccaatcacggtccccgcgggtgaaaaatcaaaatcgttggcacaaacagcgttattgtatgaacaactcttaaccgcgggttttaatcgtggtgatggtgtgattgccctcggtgggggtgtcgttggcgatttagccggcttcgtggcctcaacttatatgcgcgggattcgcttcattcaaatcccaacgtctttattagcgcaagttgacagtagtgttggtggcaagacggcgattgatttacctgctggtaaaaatttagtcgggactttttatcaaccagatttagtgttgattgatccagagatgctggcgacgttagcgccccgccatttggtggaagggtacgctgaaattgtcaaaatggccgctttaacggttggcgatttttggcaactcgtcaaccaaatccaagatgcgactggaattttggtgaacgctgaagcgttaatcactaagagcattgcgtttaaagcacaaattgtgatggccgatgaacatgaaggtggtcaacggcgaattctaaatctgggccatacgattgggcacgccgttgaagctttagcaaacggtcaattgatgcacggtgaggcggtcagtatcggactggtcgccatcacgcgaattttcgaacaaaaagggttaagtccacaaggattaactgatcaactaattaatttattacaatcggttggcctacccgtaacgactccctatttaacggattcacggttgttggaacggattagccatgataagaagaatcagggccaagggttacatctgatttatttggcgcaagtcggtcaaccacgggaaatgattgttccacaaaccgatgtgcaagcttatttaggattagattaggagaaaatgatatgcgttatatgacagctggcgaatcacacggcccgcaattaactgggattatcgaaggttttccggccggattatccattgatatcgatttgattaatcaacgcctggcccaacgtcagggcggttacggtcgcggtcagcggatgcagattgaaaccgaccaagtcgaaatcatgggtggtgtacgtcatttggttacgttaggtgcaccgatttgtttggtgattcaaaatcgcgaccacgctaattggggtgcgattatggcaccgaccgaaccgggcgatgcggtgcaagaccgcaaacgcgcagtaaccacaccacgacctggtcacgctgacttagtcggcggccttaaataccaacagaccgacttgagaaacgtcttagaacgttccagtgcgcgtgaaacagcgatgcgggtggcgattggcgcattatgcgaacaattgttagcgcaactcgatatttcggtgttaggttatgtcacggggattggttcgtttacaacgcaaccggcgcagtcgttagcccttgatttagtcgaattacgggccaagattgaacataacgacttacggttattgaacgactcggattgtcaatcgaccatcgctgtgattgaagccgccaaagccgcgcgccatacgctcggtgggacggttcaagtattagcgacgggattaccagccggactcggtgattatacgactgccggttcaaaactagacggtcgtttggcgcaaagcatcagcagtatcaacgcgattaaaggcgtcagtttcggggatggctttgcattaggccagttagctggcaatcaagcgcaagaccccatcgagtggactgcggcaacggggtacacgcgcacgtcgaatcatttaggtggtcttgaaggtgggatgaccaatgggttgccgttggtgattaatgcggtcatgaaacccattccgacccagatgaaacctttagcgaccgttgagattaaccaacatcaaaaggccgctgcctcgacggaacgttcggacgtggtcgcggtgaccgctgccagtgtcgtggccgaagcgatgaccgctattacgttatgcgaagtaattttagaagcctttggtggtcaaaccgtcagtcgcatacaaagtcgcatgaaagcttatcgacaagaactactggagcgctaatcggaggacgactatgacccatgttttaaatcagtttccccaacaattaaatggtcaaattcaggtgcccggtgacaaaagtatttctcaccgcgcgctgattttgggtgcggtcgcaaacggtcgaacgacgattaccaatttattacaggctgaggatacccgcagtacgttaacggcgttgcaagacttgggcactcagattgaacaaaaggggacgcaaacgattgtgactggtcaaggtggctttacctttcggccacaacaaaccacgttgcaaatgaacaacgccggcaccgccacgcgcttgttattaggcttgttagttcgacagccacaagctttaacgctgattggtgaccaatcattatcacaacggccaatgcagcgggtattagcgccactcaatcaaatgcgccagcaagtcgcggataacgaaacggttcatttgccaatcataattcaggctaatcaacaactcgaaccgcttgattatcaattgccagtggcgagtgctcaagttaaaagtgccctgatgttggcggcgattcaagccccagggaccagccacatcactgaaattgcgcaaacccgcgatcataccgaacgactattgcgccaatttggagggcaggtgacgactacagggttgcagcatactttaaccggtccccaacaattgactggcacggacgtgatcgtcccaggtgatttttcggcggcggccttttggttaacggctggcctgttggtgcctaatagtcgaatcaacttgccacaagtcggtgtcaatcccacacgaactggttttttaacggtcctagctttaatgggcgcgactattgaacaaacccaactatcgggaccagaatttagcgaatcattcgctgacctaacagttgaaactcaagctttaaccgggattgaagtgccagcgacattgattccgaatgtcatcgatgaattaccgttagtcgctttattaggcactcaagccagtggtcaaacgattgtccgccatgcggccgaattacgggtcaaagaaaccgaccggattcgggcaattgtcattgaactgcgaaagctcggtgctagtattgaggaattaccagatgggtttatcgtgactggtccaacagtcctgcataagacgagtcaagtgccgctcaatagtcatggcgatcaccgaatcgcgatgatgttagaaattgctagcttactgacgccagatacattacaattagaagcaactgatgcaatcgccatttcgtatccaaattttgaaaatgatttacaggggttgattaactagatgcagctgattttaattggatttatggggtctggtaaaacgaccatcgctcggaaagtcgcccattattttaagtctcaatgggtcgatcttgaccgttacatcatcgaggaacaacaaatgagcattaatgatatttttgcgttgaagggtcaatcagcctttcgcgagatggaatttaatgcgctccaacaattgattaaacaagacggcgtgattgcgaccggcggcgggattgtcgataatgcacaaacccgttacttgttgcaacaaagcgggattcccgtcttttatttaaatggcacctatgaagcccactggcgccgagtctcacgcaatgatcgacgaccactggtcaacgcgttaggccacgatgggttacgggagttatattacgaacgacggcccaaatattttcatatggcggactacacgatttatttccaacataaaacgcccaacatgatgttagccgaaattgagaaacaattacccagaatcgtacaaaagcacgccaagagattggcgaaaaaaagccaaaaaaatagtcgtccagcataatatgatattctgctgagcgactatttttattttgcgagatttttaatcgctaaagtaaaggcgcagatgattagaattaggccaccaatgaagagtggggcagcccaattttttaacagcgtcgtaccgatgatgggcaggatagcgcctaacagtattaagaccacgattaatgatttacgagatttcataatggtgcacctcctattgatttatcattagtatagcaccttaatggtagcgtttacaattaatgagcgtttgattagcgtcttcttgcctggttttagtacaatgaagttagaagaggagggtttactatgacatttaaattacctgagttaccatatgagtatacagcgttagaaccttttatcgactctgaaacaatgcaccgccaccatgataagcaccataaggcgtatgtgactaaactaaacgcggcacttgctaagcatcctgatttggctggtaaatcgttgcacgatttgttaaaacatatcgacgagttgcctgagaagttgcaagcaccagttcgcaataacggtgggggtcacgctaaccatagcttgttctggcggttgttaacggcggatgcaccacaagcgccaactggcgaattattagaacggattgaagcccgttttgggtcgtttaaaattttcaaagaagaatttacagcggccgcgatgggtgttttcggttctggctgggtgtggttagtgttagatcaaaatcatgaattacaaatcatgacgaccgctaatcaagattcaccaatcatgactggcaatatgccagtattagcgctcgatctttgggaacatgcttactatctgaaatacaagaacgaacgcttagattacgtccaaaacttctggaaaattatcaattggccattagtggcggaattggtttaaagttaaacgcgaaacgccttttaccgatgtgggtagaaggcgttttttgacgttaatctaaataaatgatattaaccaaaatagtcgttgtttttgtgacaattaattttacgttactgacccactagtccaattcgagaaagatacttggttgactatctagcatatgaaaataactggcactaatcagttataaaagtcactttataaaaattggtctgtgtcgtaaattgaatcagtcagttgcaattgctaactaaatgattgttaatcagttttatttttattaaaaatagcaatttggtagggttgatattcatttaggttgtcaatatgaagttcagattaacaagttttaaaaatagaatagaccaatgattaaaggcggatagactgtctacgtctttaattatatatgtataattaatttgtgattttagattgctattcatttttgaaagtgtatgatagcgggtataggaagcgcttcctgattgctatttaatggtataacacgccttgaatagtaaccctaaaaattgactagtggaggattaatgacgcatggttaaaaatattgaaatggtgaatacaacgatggttggcatcatgcaaagctcaaatgctggttcgccagtcgttgacggcgcattgaacgcgatgttattgaagcaattaaaagatggcttaggtcaagcgattgtcaaaacgatgacgattaagatggttgatgttgacgaattaaaagtagattcaaataatgaaaccttggttttgattaataatcgggtcttaaaaagtaccacagtcccagcagaattactggggaatcactatttaacgtatgataatgaagatttagaaaagaattcgtttgaaagctttattgagaatgttaagaaaatgttgtcgtaggttcattgttcacgaacaaaaaaattgctgatatataaaaaagaacgctatatttgaacatagcgtctcactgtttgcaaaccataaaatagccgattcttgcgagatggcggctatttttttgtgatcaaaatcaatcaaatatattaaatttctttcgattagcgcgaacgagccgattatgcttgtaatagatcattagaagcactgccagtagaacggtgttaatgatacggagaactaaagcgatataaaatccaacctcaacccccgcatgaacttgccaaatcttcgtaatgaaagtgaagtaaaagaaaaagacttcggatacccatcccgtgacaatactaatcgtagtgatattcgttttataaccgattaaataaataaaaaaactctaataacaccaaccatccccaacattaatcccattatacctatgccaaatgtcaaattattattaagcggcagaccctctttctccgtcgctgatttcaaactctttttaagagtcattaataacacggaccaagcaattatcgtccatcctaaaccaaaaataatccatgttccaaaaaatattattcccgataggttcgaattatgactggtatttatcaaactatctaaattgccaatcagtacaagcagtatcaataacgaactaaagattgttaaggataaccatcctaaagctcttcctagttgattattatttaacgagttcttattaacatttctaattgacgacgaggtcatcattactaaacaactaatagtgcagaccactattttcagcgttaaaaataaaaccgattgttgtgctgtccctatgaaccaatcaaatactgccactttaacgacctcctagattactaatatatttattatagttatactgttgattaaatgatttcattattgactgagcttgtttaagttttgcttcttcaacagcaacttccattgaaattcgcatatacttattcgtcgcatcaaaagatttattttttacaaaacctatacctttgccgattcccttgccaccaatatcccctgtaacatctgagataaattcatttcctgttactttgtatgtgccgtcccttaatatctcactagttttatttgaaattggttcgattatttcttttttaatctgatattcccctatttcagtaactgattttttcccatatgttatcgtcacaactttacttgcttcctttgccgttataccagtaactctagatggcaacattgtttgagtagatttaatagtaccgttaataatattcttacctatgtttttattcagtactgtggttaacgatttactttctttggagatactagtaactattcccctttcagctaattccttatatgccccaccgcttccaatgatacctgaagctatattagccgttgagtaaatatattcaccaaaattttcaccaaatattatttgagatcctgattttataaaatttgtaccttcatttttgccagttctagctttatcaaagtcactatacaatgtatttgcatcaaaggctgcggctgttgcaagtaaaagcaaaggaactgcggcgccgcctgatgctagtgtcaacagtccccccactacaatgaaagataagtctacaaacaaagaagctgctccagctgttctattggcgtccttttgtttttgcgcttcaactttcttctgcttcgccaccgctttttcgtattgcttttggctagtacgaatttggctgagactctgtctggcttgcttatccgcagcggcccgactctggttcattgcgctaacactcgctagggcgttcgtatattgctcacccgctaccaaattaaaaccaccgccttgatagtccgccattgttggtacggtaccacccgcgtattgaccgacgaggctgtttaattggccaattaatgtgtctaaactcgcaaaatcattggcatgatcactttcgtaacgatgccagtccgtttgctgatcgaacgccagctttttcatggtcgccaaattatcaatcaccgccgaactgttcttagtgactttcgctaaaccagtcgttgctttaatgtgttcaaccttggtcatcgtcttggtggcgctcgcaaaaattttgtgataatcgtggctgcgattagcgacttctgtttgatgcttcgataaatcgtcatcaatcaatttaaaaacgacgccattttgatcaacggctggataaccgatcacgtagaaatcgagcgtttgttgcagattgtcaaccgcctgaagtaacccgttaatcataccgttaatgtggacctcttgtaaatacgctgtgatattagtcgcggctgttccttgaaaattctcagaagtcgctaagttctggagcgctgttttgagttgttctaacttttctgttcggcgcttgagaccatctgtcgcgcgcttttgataatccgttaatttttcataatacagttttgccacgttattcaccgctttccgttagcattgtcgagggtcacttggttatcggccgccgctgaaaagcgactaatatcgtgactaatcacatcagcataggcgttgatcgccttcgttaaatcagcatacttggtttgaaattgcttaggaaaattggttgaaagactgccttgaggggcatttaacccgttacccccgtcaaggcgcttggcagccgagttggccttcgttaaatccgtgttatacgccacttgatctaaatgttgtttaaccattggttacctccgattgactatttgttaataaggactatcgatttcatattttgcgactgtgctgtacgcccctgcgtataaatcagcactgagcgcgtcgattttactctgataatccgcaattgctttctcaattccggtatttattttaccgacggctttttgaagatcgcttaattcatcgataaatttcatctgttgactgcccgcccactgtttggtcccggccgtcaccagtttgctaatgtctaacgccgcgattgcttcttgattcacacgtaatttagctatcgccgccgataacttgtctatcttagcttgtttagcggcatccgctttttttcccattgactattcctcccgtaggcttgcgaatggatccggcgcgccgtcctcatccaacgtttttaatatccgattcagctcgcccacaattaaggcgtcatcttcatcccgatagccttcaaagatcacttttagaatttgttcatgattaaaatagacgagctggtcttcaaccaatccttctggataaagaatcgccccgtaatcaaaataacgtggcgccccgccatccttgcttggtaactgaacaccgcgttgcgctattgataatttcttaacggttcctcgtagaatgataattgagcctaatgacaaaaatgcaacctgttccatttgataagacttcctttattgattatttttgaccggcaaatctcattttggcgtatttgcggcccttggattcaaagtaataggcttcattttcagccagttggcccgccatggttgagcccgttgcttgaatcaggttggtctcactgagcttcgccatgaccagcccagcactgacgatttctcgaatccccggtgcatacggatcaaagctacggccaacatagttttctggactctggataatgattgataagccggctttacgccctttttgaatcgtcagtttgaaatcggctaagttaaagttggtgcctttaaagaattgttctaaatccgcaatatacatcatggctgattctaatcgctgattctcagtcgctgcttgcacataatcagccattaattgttttaaagccgcgatatcttctaaatcattcgtaaagacttggttaaacaagtcgtgttgctcttttaattccgattccaaatcaactaagaaaagcgcattggttttcgctaatgctttaaattgcgcgaacaatactttttgaatattggctaactgttcctccgtactgtgggcaatcaagaaaaatgcttgttgatccggaataaagcctaatggcgccgtatcgcttaaggccaacccgagcggcaatttgccagcggctacccattcaacgacccgttgatcgtgattgaaggctgctagttcaaattcactgggcacaatcggtaacaccgatggccgttcaccctgccaactggccgtcatgacggtcacgtcctctttaagtcgttgtaaaatcgccagtgtttcagttttatgattcggcgtatagatttgaatcgcattcacctgctcatcaacggccaactgcccacgaccattaaaaacttgttgctgaatatactcgcggcccataatgttccttaattcatcattatcaattaagaacagcggtaactgggtcgccatattgttcaacatcgccattctgatgcctgaactgcgactcgtcgtcatcactaggtaaatgcctaacgaattgccttctcgtaaaacttgcatcagtgtgctatcaatcgcatcgcgctgatgatcttccagcgcggcatcgtaactatcgatgacgttgacaatgattggcaactgctttttcgtactcatttcatattgcgtgaggcttgccaccccgacttgttgaaaggcttgtttgcggtcatcgagttgttcacgaattcgttgcaacattttcgttaatttttcgacttgttccaaattaacgagatcggccacgtggggtaaatccttcaagggtaataaaccgttcgtgccaaaatccaatagattaaattgcatttgtgctggcgtattttccttagcaaagttgatcaataaggtttgcaacgccgtcgttttcccaaagccgggactactataaatcaaggtgttgccctgtgtttcaaggtcaaaatcaaacgtgacttgcgcttgtttactcggcacatccaataaaccgagtggtgcggcggtcgttcgtggttgctgccagttggttttaaaatcaacctgtggcgtggcaatcacgttagctagcggtggtaaccacggtttgtccggcagaacagccttggtttcagtggcaattgcggcaatttgatcaacgattgcttctaattgtgttttttcagcttgttgattggtcacttggacgacttcatcttcggataaatcggccgttaataattcagtctgcccgtaatcattaatcaaccaaagccgttcatcaattttaacttcctggctttgattaggatcgtacttggcaccactccacgcactctggaataattcgtagatttcattattcccaacttgtaaataggcccggccgggttcaacaatgctcgcagcatccggtgtctttaatatttcgttcgaatcagcgacatcttggacttttaaggccaatttaaaccgggaattcgaccagatttgatcatcgacaacgccgcttggtttttgcgtcgcgagaatcagatgaacccccagcgaccgtccaattcgagcggttgaaactaattcggccatgaattcgggttcattagctttcaattcagcaaattcatcggacactaagaagagatggggtaacggtttcgtcggatagttcgccttttcaacggggtcactgaccaacttaccggctttatacagtttggtataaccgttaatgtgattgaccccgaactgaccaaataagcgttggcgtttttgtaattcagcccgaatactggctaacgcccgggccgaactggcaccgtccaaattggtgatggcgcccaacaaatgtgggagtttcgcaaataaattcgccatcccgccacctttgaaatcaattggcaagaaaccgacatcttccggtgcgaaattgacggccaaactcaatagataactttgcaccgtttcggacttacccgaaccagtggtccccgcgaccaaaccgtgcggcccgtgcgcgcgttcgtgcaggtttaaataaacaagttcatctttgccgcgtaagcctagaggcaccgctaatgatttagaggtgtttgctttttgccaccgttgtgcaatcgctaattgagccgtcgtttgcacgtcgtacatccctaagaaggtaaccgattccggaatcgcatttttttcgacttctaaatggtttaagttcgctaaatgactaatcagcaccggtaagctttgttgattcgctaaccgataaggtttaaaacttttagcaacatactgccgatcttcattgattagtttagctgctgccaaattgtcatattcaatgagtgtcgtgacggtttccggcaacatagcagcgccttctttcccccagatgaccgtgaccccgtattgactcatgtcttctgccagaaattcatttaacccgtgaccggctaaccaactgtcgtcgagaatcgttaaaatgtaatgcggactgaacgtcaattgctcgtggctcttttcggaaacgagttggcggcgcttattgagtaattggtagaaactgtttaagaccatctctttggtttgaacattgtgtacaatcccgcgcaggtttaatgcgtggatcttgaagtggggtaaccaccgccattgtgtccaatcagttgcgtaggtttgttcggggactaaggccagcatttcgacatcgtgatacgaatgaaacgtcgcaatttgcaagagcaaggcttggacgacttcactcaactgtcgttccacccccactaaaccaatcgtttgattcaaaagaggcgttgtcaccggcgcatcttgcaaatactgatagggttcaataatcgtttcgcgcgccaattgcattaagggatcatttttttgttgctcatcatctttaaaatccaatttgaaactaggcgcgattgccccagttcccaacataactttcaaataatcttgatgattactcgtcttttcatagatccgcgggctataatttaaaattaaatcggccaacgccggcatcgctggataatgataagccagtgcgtgccgttgcgtgaccgccaactggttaacctgcgccgctttttcgacaatgtattcttgataatggctcgttcttaattgggcttgctgaccggccgtctttttattcgtaaagaatgacgaaatcgaaatccccatcgtcattaaactagcgctccccatcccaagcatcataaccggattacgaccgcttaaaatcgcagtcgcaaagctagcggttaacatccccaatggcggcaggatggttttgaacaaatcattcttttcttggtcccgtaaatttcccggttgattaatcgtgattttatctttgggttcttgcaacatgattcggggacttcttctgaaatccggaaaatcaattggatattccggttgataaggcaccgtccgtaactgtttaaactgcgtttgctgtgtcaaatccgtgattttaaattggtgtggccgccgttctagcatcagtcccgcgaccaagacttgatcaccaaccgcgaaattagtggtggtattagtcacccgtttttgattcaaatagctggcttgctcaccggccagcagcgtaatttgatactcatctgcccctaagggtgtcacgataacccgtgccgagtcttggatttgcaaattcgctttatcatcggcggcaatcaccaagcggtcaatcggtggtaaacaactgaccgtgattaacgacgagtgccggacaattaataattcagcgattcggacactcgcctgcttgaagataactggttgcgcatcaatctgtaactgtcccacgactgtcgtcaattgatggtggccgacttgccgctgttgattcgcagtcattgtgacgtgcaacaattgggcttcggtcagaaaaatatcgaacgctatttcaggggtcgctacaatttggtcgtctagattgccaacttgcggataaatcggcttatttttcaagaccattggctttgccccctaacttcttgacgtatttttgaatgctcgcctgatattgctttagccgtttttgcttttgggtcccatccatacgatcatcggccttagtgacatcgtatagcttggtgtaggcatataacgttaattgattatcgccgagattcttagccaaactgagtgccgttttaaagtcaccccgtccggtattaatccagtacaacaacgtattggtatcactctgtggagatatctgatttaacaatgttttcttttgctgattggttaaattatcgagattaatgtagctggcggctaacacgtattgcgccgatttcgctaactgtttcggattgtcggccttcaaaatatcagtcgtttgattgtaatctttggtcataaaggccgcttgactattaatcacccgcgtttgttcgggggccttaacccctgacagatacccgacactgcccgctagcaccaaggtactaaccacgagaaccccaaatccccaccgtaaccaggtatagcgactctgtttaacgggcacttgattcagcgtcatccgccggtattcggcttgtagaatttgagtgatggcttgaacgttctccgctacgacaatcgattgttcaaacggattgcgcattgccgccgagccattgaccaacgccacgtattcgtatttcggattgagtgtgttgagcactaatgctttataccgcgctaaaaatcccaatgaatcttgttgttcggggatcacaacgccttcaaaaccacgatgggccagtctaatctgttgttcagtgacccagatattttggggcgctaagaataaattaacattctggccttgccaatggcctaagacgttcaacataatcgccaagcgcaaccgttcttgctgattggccgcttgactagcggcttgcaacgtctgcccccatttcggtaaggcatattgaatcattaactcattatcttgattgaccgttaatcgaccgggcaataaggtcggcgcttcagccaataacgtttcaataaacgcttgttggccagcttgatattgattggcttttaacgtcacttcaaattggcccgcttcgatccggacttcaatttgattctgaccatcattgatttgtgtcatgcttattttccaccacttcttgaattataaattgatcgccatcactgactgggtaattagcgagcagttgatcgggtgctaatcgcagctgcttgccttgcaacctcaaatgccactgttgcggcagtgtaatcttgagttgttccaaatttaacgcgatcaaaatttctaaacgctgagtcgtcacgtagcgtggcacctgtaaatcaaaggattgcgtttgatactgtaatgcaatcgcgatactggtttttttaaccattttcaatcgtgcctcctaaaaaaatgtgcttgttgtttcccgatatagacgcccagcaagctcgcgactatcaccgctattccgccaattagccaccataaccaggttggtagactagctgccgtcgcttgattagtcgtggacgccgacgtctctgaggtcgcaacttgtttaaacgcgatttgtcgttgcacctgatgatcggctttttgggaaacctggcgtttggtctgaaaatcaatggttttagcttgttgaatttcagccagcaccgcttgtttctggcgcttaacggtcgtcgttttagccgttaagaatagatcaggtagcacttgatacgccgtactgacttgttgttgcaccttttgattattggtttcaatcacttgatcattaattttaagcgaactgctcgcgctaaccggtttgcacaacgtgagtatcaaaccgattgctacaacgccactagtcagccattgtttgttgaccacgttgcacctcttttcgatcctttaaacagatgatcaagacacataagctaaccatcgctagtaataacagtaagattaacagctgcgcgattgttaacggtttggtcaataattgtcgataaccattctctaaattttgtaaaggtgaccctttaaatagccagaataaaactgacttggtttgaatgttgatgcctaaaatcggcgttaacattaggtaaccaccgattagaatgccgaaaagatacggggccactttcggaaacagccgccaacagcaataggtcaataaaacactgattaaattgacgccggcggtataaagtgaccaactactacgtgaataggcatcactaaccccgaaggtcgcattcgccacgactaaactcgccaataaactcgtgaccgttaaataaccaactaatcgccaactattctgaatcgtcgtctttttggcgtaactaatggccaataataaggtcataatcacggataagaccgtcattaaatacggaatcgctgacgtgttttgtgcggttgtttgcgaagccccctttttaatcaaaggattggctaaaaagttaaagacattttgattatccgcaccacccgtatgcgtattctgtaaaacactgttgaaatcagctgcgtatttgcgattggccgcttgctttttagccgaactcgacactaattgattcgtgttctttaaaacttgattcgcatcagcattggtcgccgttgttgttttgacgagggttttaaactgatcggttaaattaccgattttggtagcgccagtgctggtactttcgacttcttgtttggtgctcgtattcaattcttggaacgcatcggctaatgaatcgccggtgccatcgtcaaaatagaactcactgatatcgtcatgggtgccttcctgatattgttggcgactagtcgtcaattgtggattgtcctgccattgttgataggccgactcaagagcgctgttgctttggcgataccaactcgttaatttttgttgttgttcgtttaacacttctggcgttcccgccatgctggtcaacgtcgcatttaaagaagtgccatcgtcgttgtttagtacagcgtctaaatcggcaatcaaatgcgtgacttcgttccagactaagtgaccttgttgcccatactgttttacataataatcagcaatagtgtcctgacttaaataatcatatttgttataaacggaatcagggctcgctaaagcactcattttagtttgcgcgttctgttgcttcaaccaagcattaaacgtggttggtgttaactgctgggtcgtcccaaaaatcgtgacaagtcgttgactgagattggccaacgtatcgaagttcgccgtaatcgcgccaaaatcactttgcaacgcttgggttttaagcgtgtcattgataaaacaactcaacgtccccttttgaacttgattgttagccgcatccgaatcttgatagacaacttgatagttcaatgtccggtaggccgtcttgttatccgcatcattaaacgtccaagtgaccggtagttttaatttgagaatgattgatttcggtattttggttgacgcttcacgtggtgttttgaaccgaatcttaatcgcttgaccttctaaggtcgccacgccttgataaggcgctaattgctgatttaacgcggctaattcttcagtggtcagggctaatgccaattgctgctgattggtcgctgtgactgtgatggtactttcttgattagtcatcactttaaccgtattctcaaccgtcgctttggtttgttcaggtgcgaccggattcgtcgtattcaaccaaatcaacttagaatcactcgtcggcatcgcttgtcctaaatccgtttcggcataacgtttaacaatttcatattcagcttgtaattgattatgttgcgcttggctaatcaacttagcggccaacaactgttcaatcaacgcgggtaactgaccatctaagccagcgacctgttttttgatatcatccgcatttaaataatcggccatcggtaattttgaaggactatcaaccggctgcatgatttttttcactgattcgcgaatatccgcatccgtcacagccccttgactcgggtctttaccattgaaataatgcgtttcagtttgcgttttgagtaattccagatgcgctttttgttgcgttaatgccgtaatttgtgcttttaaatccgtcatccgtttttgttgcgcttcggaaaaggcttggccaacctcagccatattcgccaataacccggattgattgcccgctgtatcctgactggctagctgatcaaaattaactaagcgcacatcattatattgctgatagaaatcttgatagactttcgtatcggtcgttgactgcttagccactaaggcatcagcatggttcaaattcaattcaccaattttattttgcaacatcacgtatttagctaaatcttcggctgtactttctgcagccacgctatttgcttgcagcatggtttgagtcgctttggtgaaatcagtctgttgcgtttgccaatccgcattctgatcatttaaaccttgggccgcggtgacaatttccgttaaactagtcggtaacgttttaaacggcgtctgaatctgattggtcaacgccgtttgggccgtttgattccccgctgttatgccagagacatttcgttgtgcttcagagagattcgctaacacgcttgaaaaatacattttgataatcttttgattaaatgaatttataatggtcccaattttcgcttggactaatcgattcgttttttcactagccccttttttaactttgtatgtaatttgcgctttttggggattcatactctccaaattcaataaacgctgcgaaaaattctgaggcaaaataatttcgacatcgtaggtgccattcttaaaaccggcttcggcaacgttttgtgaagcgacttgccacgaatgttgatgatcttgattaactaaattgataaagttcttccccaaattgagtgtcttattttgatatttcgtacccaaatcttcgttaaccagcacataatgcaccgtgctagcctgcttattcgataactggtgtaaatgctgattattcatcccaactttaatcaataaaccactgacagctaaaatccccaccagaataaatataaaaccgctgattttattaaactttttcatccattttcctccacaaaataaaacgacgttagcaatcttttgccaacgtctgtttgtttcctatttatgctagctgattaaaagccaaagcccttagcatcttgtgcatcccgttcggcaacagtattggcatatttattcaattgcacgttgatactttccaataattcttcaaacttggtcacttgaccatacaattgattgtattgttctaagtaagattcaaaagcagacccttgccattcttcatgaatcgtattgttcatcgcattgaccgtttgaatctcccgttcaatcccttccttcgcgcgtagatatacttgcgattgttgttgtagctgttctggtgtgacggaaatttgtgccataatgattcactcctattgtttaagttattattttgaacacttaaaaacttaacatataatttaaatataatcaataatatatatgtaatttatctatatttaattactgttttcagcacaacatctatttaatcaacttatttaatgcgcaaaaaaagccaaccctctatgagaattgactttctaaatatagatttaattggccattaaaatagcgacatattgttctaaataagtttgatcgatgacatcataatcagcgactaactcactatcaagatctaaaacgccgactaactgattatcttgaagcattggcaccacaatttcagaccgggcccgcgaatcacaggcgatgtagttctgccgttgcttcgcatcagccatgataaccgtcgcttgggtttcagctgattcgccacaaacccctttgcccatcgctatgtggacacacgatacattcccttgaaaaggcccgagaatcaattcaccgtcttgatataaataaaaaccggcaaaaaccgtgttcggtagcgtctggttcaacagcgccgaggcgttcgctaaattcgcaattaaattcgtttcgcccgttaataaggctttttgttgcgccagtaacatctgatacgccgcgaccttcgtttcttgatctttaaatgccatctcaaccaccccttttgagatagtataacgaaactagctacttttgacaattttagtgttggctcttaatcagtcaccgctaatgcagtttgtgcaacggactgaccgttgacgattaacgtcacttgatggcagcctggataatgcttgcgcgtcgttaaatctttaaaattaagttggcgttgggcaactaacggcatagcaccattaaccgatttatcgagtaacttaaagagcttccgcgatgtttgtccgttagctttaacgtagtccacggcgtattcaatccggacaaataacgcgtcttcagcccgtagttgaacgttatactgtaataacgttttcgccccaatcgcaacagttgtcggcctaaccattaagctagcgaactgcaccaatggtcgcttgggttgatcaaccgcataactaaacaagcctttaaccgtatcaaacgacttacgcaataaagtgcgacagccatgacgaataatccaatcagtttcgacggattgaccttgccagcgtttagcggtcgcaatcactaaattcggatgatctttggcaatatcgtttaaattattggcgacacttttacgaacatacaaggccggatcatttcttaattgttctaacaacgccaaaacaggtgtcggatctgctttaaaaattggtagcgactgaccccaaggtaatcggggtcggcagccttccgtcgctaaacgccgtacatgttgatgatcactttgtgcccaacggtttaattgagccatcgcacgcgttgggtccgctaaaataaatggtcgaatcgcaaattcagccgatgactgttgcgtaaaacattctaaagctttcatcgataagtcccaatcagcttgcacatcaacataaatgaccacgaagtccggaaaaaagagatacggaaaaccgtggcattccggcgctatggtcatcaacacatcaatagccttcgaatacgactggggtaaatagtggcccaaaaccatcgctattttacgcgtccgttgtttcaacgccaactcatcccaaggttgcgccaaaatggtcgtcacaaaatcaaccgtattaaaagttggtacaactttttgtactttggccgcaaaagtcgttaaaaactctcgatggtaaacatcctttaataattctgccatgaacaccctccattaatcattcatctttattataccaaaattatataaaaataagattgttcacaaatatacaaacaaaaccttgatttgtcactaaactgtcgatatgattaaatcaatacatagaaagtgaagtgaaatatatggcaaaagataacaatttaagtcgtagtctatcatcccgtcaaattcagatgatcgccctcggtggcacaattggggtggggctattcatgggttcggccgccacgattaaatggacaggaccttcagtcttgcttgcttacggcttaatgggcattattctgtacttaattatgcgagccctaggcgaaatgctctatctggatccttccaccggttcatttgccacatttggtagcaactatattcacccggtcgtcggttatctgaccgcgtggagtaacgtctttcaatacttagtcgttgggattagcgaagtgattgcggtcggcacctatttacattattggtggccgaacctgcccgcgtggattgccggcgttgttgtgattgtcacgctatgcttggccaacctcacttcggttaaagcctatggtgaattagaattttggtttgctctgattaaagtcgtcaccattattctaatgattatcctcgggctactcgtcattatctttggcttaggcaatcactggcaaccaattggcattagtaatctttggaaacacggtggtttcttcaccggtggcctgtcaggctttatctttgcgctgtcaattgtcgccgcgtcttatcaaggtgtcgaagtgattggcattaccgctggcgaggcggccgatccgcaacataatatcgtcaaagcgattcaatcaattgtcggtcggattttaattttttatatcggtgcgattttcgtgatcgtcgccatttatccttggaatcaattagatgccgttggttcaccgttcgtggaaaccttctcgcgtgtcgggattactttcgccgccggaattattaatttcgtcatgttatctgccgcgatgtctggttgtaattctgggattttcagttccagccgaatgatgtataccctcgcccaacgtggtgaattacccaagtcattcatgaaactttcgaaacaccaagtcccttattggcccgtcgttacaatttcaatcgggattttaattggcttaattctaaacactttagccccactaattttccctaaagcaaccgatttattcgtcgttgtttatagttccagtgtcctgcccggtatggtgccttggtttgtaattctaatcagtgaactccgtttccggaaaatgtatcccgaaaaaatcgttgaccatcccttcaaaatgccattctatccttggagtaattatatcgcgattgcctgtttaatcgtgattctaattttcatgttcttgaatccagatacactcatttcagtcattatcgggattatcttcctcgtcgtcatgacgggtgtctactatttacaatacggccgtcaaaaacgcgcctaattaaaaaaagttcggttaccgacaagtcaacgtcgctaaccgaactttttttgatttaatattgaatctgtcatttctctaaataaagccacattcgtccagcaacttaagctgaatatagctttattgggttcagtacttgactgcctagaatgatggtggtgtcacagaaaaaataacctcaacttcaactgcttcgatattttcccatttatgcgtcatataggctgggattttaacactatcccctttttctaaaacatataactgcttgtctaaatataaattaacctgaccggtcaaaacataggcaatctcttcaccattatggcccatcggttcatccgatgaagtaacccccgttggaattcgtaaaatcatcgtttctaactcacctgaaaaatctggtgataataactcatacgataaatttttaacaaccatttttttatgatcgttttttctcgtgattaatccctcagttgttttttcttctaagaaaaaataaaaaatcggaacctctaaaatacgagaaagcacttttaaagtttgaatcgaaggattagcggtcccccgttcaatttgacttaacatagacggtgtaatggcacccttatttgctaaatcgcgcatcgtgtaccctttttcttttctaaattttgcaatctgattgccaatattgactgtatccatctcgcacctcttacgttaaattatattaaacaaaaagcataaaagttaaatgtgatttgacaaaataattttaatagcttacaatccttttatattagtgtttaacaacgaaatgaaatcgctaccttttgtctttgtttgattaatcatctttaacataccactattcattatagataatttcatttaactttaaaaggattaaattctcgttgacaaccactagttaccactaaaactgctatagaaagaggttttatgatgacaattaaaatggatccattcttaactgatttacaaaattgcaaagaagtttgctggaaaaatccaaatttaggcaaggacaccaaaacttatttcaccgtagcagatattcaagatgcttccgatcgtttagatcgttttgcgtcctatatcgctaccgtctttcctgaaactcaaaaaacaaatggcattattgaatcacgtttaactgaaatccctgatatgctagaagttttaaaagaaaaagaatcaattgtcaccgatagccaattatatttaaaatgtgataatgatttaccaatctccggttctattaaagcacgtggtggtatctatgaagtcctaaaatttgctgaaacagttgctttagaatctggacaattggcattaaccgacgactacgctaaattagcaaacgaagaattcaaaaccatgttctcaaaatatgcgattgcggttggttcaactggtaacttaggtttaagtatcggtattatgggcgcaaaactcggtttccacacaactgttcacatgtcgaatgatgcaaaacaatggaaaaaagagctattgcgtaaacgtggtgtgaccgttgtcgaacatgaaggcgattttagtaaagctgtcacgctaggccgcaaagcggctgaaaaagacccacaatgccactttgttgatgacgaaggctcacgtgatttattccttggctattccgtcgctgcattaagattgaagaaacaatttgaagaacaagggattgaaattaccgctgaaaagcctttatttgttcatttgccatgtggcgttggcggtagccccggaggtgtcgcttttggattagtaacaatttttggtcctaatgttaaaattgtttttgttgaacccacacatgcaccttctatgttactaggtttatatactggtttgaacgatggcatttcggttaatgatttaggcattgatggcaaaacagccgccgatgggttagccgttggacgcccttcacgtttggtgggcacggtgattaatccaattttatacgccgcgtcaacggttcaagatgatcgtttataccaatatttaacgcttttagccgatagtgaaaacatctatgttgagccttcatcaaccgccggaattgcttcatttgttaatctcaatcaaaaattagcctcaacagaaccttcaattcaaaaaggaacccatctaatctggggaactggtggcaatatggttcctaaatcagaaatggcctcatattacgaaaaaggacgttccttattaaagtaacgattaggtgaaactaaatggaaatgatcgttttactattagcaatcagttgcttaatctttctaagcgttaaagtaaagttgcatccctttttcacactattgaccgtttcttttatctatggtctactctcccatcttagctttattcagattttaaagcttgttaaagaagctatgggctcagcagtatcgagcctgggcttaatcgttttagttgggactgtcactggtggcctcctcgaaattagcggagcaactgatgtcattgccaaaaaaatagttgctttaacgggtaaaaagctctcaccgattggtctggctttaacgggtttattggtttcaattccagtcttttgttcatctgctttcattcttttagccccattagcgaaaaaaatgagtaaagaggcccatattaattatatggtgatgattattgcgctaagtatgggctgtctgattccaacgacgtttattccacccacgcctggaccactagctgcaatggatatcctatccttgaatatgggaaaagtgatgtttatctctctgatatttggtttagtattaattctagttgtttttggttgtgctaaatggcttggtcataaatacccttacccaaccgataatctcaaagaatcagacgaaaccaacagacaacctaagtttgggtttggctttgcaatttcaccgattatcgtccccgtctttttaatcatgttaaagactttcttaattggttcaattaactcccataccttttattatgcgatactagagacgcttggcacaacagaaattgcgttaatcatcgggttactgttagcacttagtttatgttggcaaaataaaaaagatgccagtgtctggcaattcgatggtgtttttggtcaatcgctacaagccggcgcccaaattttaatcattatttgtgccggcagtggttttggtgctgtcttgcaggcaaccgatttaaaagatgttttagcaaacttactagttggttcatcactgggtctattaaccccatttttaattggggtcattttcagaacagcaattggttcgattaccgtctctttaatgactgccacatctattattgcccctattattccggcgatgggttatgatggcttcatcgggaccaccttaatctttttagcttgtgcttccggtgctttcatggtctttcatggcaatgacgatatgttctggtcggtaaccacggctgctgatttagactctaaactagcctataaagtgctaccgattgccagtatcatcatctcattgaccagttttatattagtttgtattttagctaaaattctgctgtgaaactgaacctcctctattaaactaaagcacattcggtatttataccgtaacaaaaaaccttactgggcgagcccaataaggttttttgtattaaatctttaaattaacttcttaatcccgttcctttatcaatcaagtaccaacaaatcgtatataacacgatgatgaatagcactagaatcgtgattgagaccgcaatcgacacatccgcaacccccaagaaaccgtaccgaaaaccagaaatcatatagacaatcggattgatttttgaaaccgcctgccaaaaaggtggcaacattgaaatcgcgtaaaaaaccccgcccagataggttaacggttgtaacacaaacgtcggcacgatcgacacatcatcataagattgtgcaaaaataccattaatcagaccggctaatgagaacaaaatcgccgtcattaaaaaggtcacaatcaccatcaaccatgaatagacgtgtaatggtacgaagaacaaggaaatcatcgtcaccaaggccccgactaagatactgcgaccaagcccgccaatcacgaatccccaaataataatgtgggtcggcactggtgcgaccagcaattcttcaatatttttctggaatttttgcgagaaaaaggacgatgatacgttggcgtacgaactcgtaataaccgacatcataatcaaaccgggcacgataaaggccatgtaagaaaaaccgcccatattaccaatccgcccgccaatcattttgccgaaaatcacaaaatagagtgaggtcgtgatgactggtgggactaacgtttggacccaaattcttaaatagcggtttgtttctttgaccgctaaactttttaaagccgttaaatataaattcgtcatcctatttcgcccccgattggttttctgtcgtaattttcaaaaataaggcttctaggcgattcgactgattccgcatcgacagcactttaatcccttgcgcacttaactgttcaaacagcgcattaaccccttgatggcgttcaacttccactaccaaagtctgggcatcttccaagtgactctgataaccctcaatttcagggctttgagtcccttcagccaaatcaaagataaaggtttcaaactgtaattttgccagcaatgctttcatactggtattttcaatcaactcgcccgattgaataatcccaatattgcgacacagcatctcggcttcttctaaataatgcgtcgttaaaataatcgttgtcccactggcattcaatgcgcttaaaaaatcccacatttcacgtcttaattcgatatcgacgcccgcggttggttcatctaagattaataaacgcggttcatgcattaaggcccgcgcaatcattaagcggcgtttcataccgccggaaagcatccgcgcgcgcacgttgcgtttctcccaaagatcagattgtttcaaatacttttcactgcgaatcaaagcttccttgcggggcacaccgtagtaacccgcttgattgaccacaatctgttggaccgtctcaaacgggttaaaattaaattcttgggggactaatccgatctgttgtttggcacgaaccaaatccgtatcgagatcatgaccaaaaacttgaacatgcccagctgttttattgatcagcgaggtgacaatcccaatcgtcgtcgatttacccgcaccgtttggccccaaaagcgcatagaaatccccttcgtcaaccgttaaatcaatcccgcgcaatgcttcaacgcccgatgaatagaccttttttaaacctttaatttcaagtgcagcagtcatttaatcagcaactcctttttatctattctcttttctgaatctaacttaaaaatttgagctgttagtgcttgaaattctgccagccgttctggcactagtgaatagtactgccattgaccggctttacgcgccgttactagtcccgcttccatcaagactttcatgtggtgcgaaagtgtgggttgtgtaaaatcaaaatgatctaaaatttggcacgcacacttttcacctgttgaaattacatctaatatttgcagacgattcggttcggccatcgccttcattatttttgataaacgtaaataatccatcatgtcactccctacatagataactatctatctttaatatagatgaccatctatcaattgtcaatcagtcggccaactaaaaaagactgcaatataggtctaagcatcctgatattcaataacattcttcttcgacgcgcaccataacgcatcaatttccgtttaaatcaaagaaatcagattatcctaaattcgggataatctgatttcttaacttgataggcaattgacaaccgcgttctgtcacagctggtttatttaaaaacgtccgtaatactttgaataattttctggggttgtttgatcgattgcttcgctttttcaacaatttcattggtcgagaagccgctgaccttggttgtcgcatcgctggatgatcggccagttgcataatcaaactgcaagcccggttcaatgttccagacatagtcattaaagttgagcgacccatcacttgagatggcttgtacccaatagccccgcggcatcagttcattgccccggaaaactgtcgtgacttgatagatgaccttttgtctagccgctagtgcatcacgcaccttttcttcaaaaatttgcatcgttttttgattgctatattcggactgagtcgccagatttaacggattatccagactaccttccgtaccttgctgatagtgaccgttctgatcaaaattaaacgtgatcgtataggctaataaatgcccgcgattctggggcgtcattcggcgaccattaatcgtgaccggttgattatgccagcccgttggttgccagttctgactcgaacgaccttctgatttacccaaattgcgattcgataaatacccagtgaccgtggtcgtccggtttaacgcatccaaagcgccataatcaattttttcagtctgccaattagcaatcgacaaggtgcttttaccgtcattcaccggtagataagccgcatccccggatttaaaatcccgcgccgctagtgtgctgtattcaggcgcaatatttttggacgtcgttgtactcgaagtgctggtcctttgactcgcttgattagtggtcggattggcctggccgtaatggtaacccactgctagcgcggccacaattgtggccgcactcgctaatttcttaaacttcatcttgtaacctcaatcctctttcgtctctttctaaaactcaattgcgtacaaaacggaatcatccagtttcgtaaacgccaatttctggtagaatttttcagccggcatcccacgatcagtatccaaaatcatggcgtgcacgtcgttagcgactagttcagcttgcagcgcctgaatcaacgctttaccgtagccttgaccttgtttctccggatcaatacacaatgtatctagttggtactcttcaccccgataccaagaccgcacaaaacctaaggcgatcccaacaattttatgatcaacctctaaaacccaagattgcgccgtattcatcgacagcaaccgttgaaaatgacgttcaatatccgcaacttgattgtcctccgaccaaggcgcctgctgaaacgttttaacatataattcagcggccgatttgatatcagtcggttcgaaatttctgatgtgcatatagacctccagataactgctttaatgccattataccaaatagatagttaaataacggtgttggtatattgctaacagcaactatctgttacaattaaaaatgtaagcggattatcttattgaggagctggtttctgtgagttttatcgatgtattatttaatatttatgacttaagttgcgcggccattgattttgttcgacgtgcggttaaacgccatcaataggctagccgccattcattaataaatcgctttttaaaacttaataataacgaaagaaacgagctaccgattatcaggcagctcgtttcttttgttgttataactcagttcgaactaccttctacaaaatttttaattttccgatttgccgtaaaaagtaaaccaaagataaccatataaattgcaaataaaatgataaacaattgccaatcaattatcgttgctagcttcccaaaaaataatgagccaattggtaatggtgccacggttaaggtattaaaagcactaaaaaacttcgcccgttgtccttgaaccagactggcttgcagatacggcgttgtaaccactcgattaagtccttggaacataaaagcgattgcccaaaatcctaaaaacagataattatttttaagcaagcatgaaattgtcaaacaaaggcccattctaaaacagctaatcgggaatagactacctaatttaaagtgttttaataataatttagcaaacagtgttgtcccaattgtcaccccaatggattcaattgctaaaagcaggccataaaagcctgcaccgcctaattctttaccaatcaagacggcaaaaacggctaatcccccgaagaaaaaattggcgagtccaccaaaaagcgtaattaataggagatctttgcgcgcccgaattaatgcaattccgctaaagatagacgtcttttccctttcaatattggtcgcgacattttcaggcacatctggcatttcaattttcataaacaaaaaggcactggcaataaatgaaataatatcaatgatcattaatgaaaaaacgctaaatacttttaataaaaagcccccaatcgcattgccaacgtagtccatggcattgtaggaaaaagacatgtacattgaagcacttgaaagccgattttccgtaacaatctccggcatcaaaacgtcctgtaccacataggcgttcatcccaaatgttgcaatcaaaaaagcaaatatacaaattaagctagctttcatagtcgtgtccatctggaatgcaattaatagaataatgggcaataagaataagccttgtcctaattcaataaagactaatagttttcttttattagttctttcaataaaatcacctaaaagaaaagagaataaattaggaataaataacgcaaagtttaatatccccacccagagactggaattggtcagtgaaaaaatataccaggacaaaccaatggcatataaactatcaccaacgttactgatggagcgacctatgaataagcgtttgaaattttgattaatcaaatttttctcctacattgattttaaaaatagctttaagtcagacaacttccacttgttaggtccttcatcctttcacattgaaccccgctatcaagcgtccttttcagcactctggcagcatcatcattaaaatactttactaatgatattatcaattgaattattagaagtcaaggaggattaaattagagaatattcattttatgccgactgaggattatcactttacttttcaccgattgttaagtaaacttaacgaaagagggtgagtcagtgaacaacgatatccaaaatagacgtgaagcaatccatttaagtcgacaagcgctagcggatttagttggtgtcagtcgacaaaccatttactttattgaaaataaacaatataaaccttcgattgatttagcacataatctggcgcaagtatttcaaacaactatcgaatcgctttttttcttcgacaactaacccaaacgaaagtaggctatctaatgatgaaaaaagatgaacgtagtcaacaaaattacgaacgtagcggttattacgccctgttattctcaatttttctaaatataatcggtatgattgttctgccgattattgaaaaaggccctggattagcttttatcagcattaccactatttacgttttacagatgcttttttggatcatcatgaacacgttattgatgagaacaacgctgcaaacccatagtcttttttggttgattggcgcaattgtcgcacccctgatcggcgctttaatatttatactcacaaattatttatcaatcattatcgctagttttattgtcagcgggatgcttgctatactatttttcaaacaacaaaagaaaaattaacgggggtcgtacttatgagcaaaattgttgattcattgaaaaaaatgattaaaaattctttttatatttgtttgattaccttattattttcagccacaattgacgcgtggttgctgaccgtatcattggctttatcagacgtaatcaaaccccggtattcaatgatgtacggtgttttaatttgatttaaaaaatcaactttaatcgtttgttgcccagttgtactgtcggtcgtaatactcaacgtgtaatcttgaccttcttttaaaatccgactaggatctttttcaatcttaccgtctttatcgactttggtgccgtaaaccacgacatcctcttttgaaacataagtgttcgttgacggtgtatctttgacgtgcacgttatctaacgttgaaccagaactattgaccgtcaaatcccatttaacgtaagtactatcatctggatcttgttcccccgtcttttcaatgatactaccagaatgttgggcttcaacgctggcacttaaatcatgtgaagtcccgtcattcgtgaagtttgccgtattcttgtactgttcactatcgattaattcaccttctagactcgtctcaaaaaccaaaacataagctttatgactgccttctggtaaattaactttaacttctgacttcgactttgttggttccgtaatcttggcgttttgaacttcactgcctaaggtgtacgaaccatctttattaatcgttgcttcataaagatgtgtactaccatcaacatagttttgtttcaccgaaattggatcaacaatcgttgcgttcttcaattcctgttgattatagttgaccgccacggtccaagtgattttcttggtcgttgcattataatcacctgatttttgaccattgtatttaaaagcgggtttgggatcaaaattctcatcggtttcattatgatgtttgccaccatttgcatcttgccaatccattgatgccccgttgttaaacgtcacatccccttcatgaccagtcccatcatcaatcgaccctgtttcaaaatgactcttgtaagtcaattgatattggtgatcagtgcctgattttaacggttctttaaacgctacggtaaacccatcggctgtcgccaccagtgtatattgattcgctggcacaacttgtttcgtcgttttatccatgatttggaagctatctgccaagaacgtttggccttttgataacgtatcggttaaatgccaattttccatcatgtaaccggcattgttgatatcaattttccacggaatttcgcgattcatataatcaacacttccatcgatatttttaacgataccttcttggttagccgtcccttctgaatgggcatcttcacccgtatcattcgtgaccttattcgaaattttagttgggtcatcgacgtaaccgtcaactttcgttgtgtaatcaattttaaccgcgtaatcaatatcttttaaaaattcaattttaaacttattgggatttttaggatccgggattaacttgtaatcaacgccttcaaccaacgctgccccttcaactggcttaccgtcgttatcaaacgttactttatgcaacacaatactatcttgatttaacgttaagccatcgcccattgtatcttcaatataagcgcctttatgatgcaatacttcattaaaattgtaatcaacttcccatttgtactcttggttttcaccagtcgaagtgggacccgatttcgtcaatgcttttttatattcagccgtaacactagctgaagcatcggattcggtcacaccatcatccaagaccgccgtgtttttgaaagtgacgtcgccaccgttagttggtttgacgtcatcgtcaattttgctggtatatacaacttgaaaagcctgatttgtttcggcatattgaccaatcaaagtaactttaccttgcgcatcgacacggtaatcagtgccttcttttaacggatgcgttttatcgattggtttaatgccattaccttgtgcatccaccttaatcggataaatcgcaacactctcaaacttagtcccattgggcattggatcagtaaccgttgcatcggtcatcgtcgttaatggtcggttaatattaacttcccaaatcacttgattcggattaggtgtcttatcaaaatgacccgccttatctattgcttggtcataatctggtcgaacatgaacgggttgtcccgggaaatgttcctccgttggcgtcgtaatgacgatatccccagttccaatcgtcttatcaaatttagcatcgtaatcaaacgtcccatgaatatcatgatcagtgtcgactttatcattaaattcaaaatgaaccgtgccatccgcgttaaccgtatacgtcccgtattcacctaacttaccgctacccgctttgatttcaaccccatctggtaatttaaaatcaaaataatcgccagcttgcatcttttgtaatacttcttctgggattgaccaagtatagttaacgtggacttgtgcatcaattggcacatcggtttgatccggatatggatcaccattcttatctaaataagtcaccgttgcactttcaataatcgttgctggatcaattcctgcctgagttaacagatcacgaatatcttgagctgtggctttttcctgtttaggtttaacgactgctttaaccgaactactcgagctagtcgtcactgtcgattccgattgactgtcagttttaaccgattcactctggctagtcgcactacttgtcgagcttgaactaacttgattatccgtcaattctgccgtcacttgttgttgatttaagtgcgccactaaagttgtctggctctttagaattgttggatctagtttcaaattcaaatccaacgtcccttgtgtttggggcgcaattttcaatttgattgtctttgatcgtataactaacgccagcaagcgtttgagcttgtttaacgtctaaaatatgggcatcatcgatttgaatcgcctcagtttgttcagtatccgtttggttattcacctgtgtctcaagttgtgcatcaaccgtctgtgtcgtcgattgcttaacctgcaacttcttcaactgaacataatctgttcgttgcgcaattgtttccgctacaactattgccggtgtcgccaaatattgaacgataattattaacgccattaatataaagataaaccgactcaaaccctttttctttcccatgatacccctccattacaagctacaattagtagaacttgctttcattttagcactgcagttgttaaacacaactaatcaattgtcatatatctacaaaattaactggtatgcaatttaatttaaaactatttatattcaaaatctattaacataattatcattaaaaacataatagtattaggccttaacagccgataacggcagtatatcatttacgccagacatcgtaaacactgtttacaatgttcaatttcataaaaatggttatcagatattgatattattgagtttccggattttttattaattgcacaaaaaaaccgaatcgactatcttcaccatcgattcggttttttaaatgttatatattagtaaataataatagttatattgataatcgccaattgaaatcagcggtataggtgcccactgaatagtgattgctgaacggcaatctaaaatacaaatatcgttgtgtactaacaatagccggaacagaacgatgaccaccaatcccagcatccgccataaccccaattggactctgattatttggatcgaccataggtgtataaccgctcgtttcaccactcaattgatacaataaattattcggcaaattgaatggcgagtcccctgccgtcaatcgacctaaatgtaattggtactgcgcttgtaatggattataaaccgctatttctggttgttgtgccgttccatgattggccacttttaattgttttaagctaatcgtattcaacaacattttgacatcgctatgaccagtttgtccaagttgttctgtcccaaaatctaatgaattaggcaccgaaacttgcaagctcccttgcatcgccaagttaaaggtcaattgactactcaactgactgccggtcgtatctaaatcagccgtggtcaccgtcgtcggtgctattccgaattcaatttgattttgacgttgcatttgatagcccatcacattcgagacactggcgatcgccccactgctttgtggcgttatttgatagtctgaatctttcgataacaccgcttctagatccggaatcgtcaccgattcgccacttagattggcttgatattgatgccatttccctttatttccattcgtgattactcgatagaatagatgatattgatcagccggattcgtgatgttgaccgttgtttgaattcccgaattcggtaacggctgtaaatgactggttgcatcatcataattaaaagtaacagtttgattacttttaaccgtttgttgctgattgccattcttaagaatcaccgacgctaactgttgtggtaaattagctggattattcggatccagtttttcaatcgtatcggtgctcaacccgtcagcgtcaaaatgactcgccaatgaacgttctgctgtaatattattttcaattaagagcttgccacccgtaataatattaccaaaaaaattagccccatcgccacgattggccaacgtaaattgactaacattgggcgttaaaattgtccctgccatcaattgtttaacatcttgcccctcaactttgaactcaccagttgcattcgcaaaattgttcataatatgtccagaaatcaacttattaatcctattcgtaccatcatctggattagccgtgccgttgacaataatcttatattgactgtctgctgtaaaatctggtgttttcgtccaatttaaaaagatatacggactatatgcataggtttcatagtcactgttccctatcgccttcgtgcttttaatagtcgcatcttggttagtgatattaatggtcacatttgtcggtttacccgataaattcacaaaaatcaagggtgggtgttcagcataattttctgtataacccgtcttcaaattaatgttaacaatcggattagcccccgtcccaccgatgacactcgctgaatcaacggtgtctttgctataactgaccggtttttcttccgaagtaaaacttgcatagaaagcactaatctttttcaattgttccgttgctgcggtgaagtaagaagaatcatcaccatctcgactaactgcaccgattaatttactttgattatctttaaaatccgtcacttctgataccaaactcgtacttgttcgacttttcaaggtgctattatcaatttcaggataaggatactttagtttaaactgacctaattgattgttcttaatcgcaaccgccacattattagcaacaatttgattctcgttgccttctgcaaaccgatagcgcgcgttaaccatgctaagagcattatcgccgaccttatttgaaacaatcacaggttctgctttagccacttcaaaatatttagcaccattattataagcgccctcgaacacattgaatgtttgactagcaaaacgcccctctaattgttcaacattactagttccaaccgtcaaatcccctcccgcgaacaccccgtaatacgaggcgacacccagcgggtaattatcttgaccgtctttagtgactggaatcggtaaattatcgtcataatcactagcttgtacaacaacagtacgaccgcttaaataaagaaacgtcgttgcgagcaaacaagccattaaccatctattaaactgtgcgactcgcatatttctccccctcggattattctagcgttctttcttgacgcgttttctagtccctaaatagtaagttaaacctaatactaataagacgatgacgattgccaataacaaccaccagaaccaattaaaccgttgattatgccgattgatttgagttgcttgttttaagctaatcgtgaaattttgattaaacgtccaacgatattgactgttactagccactaaatgaactcggtactgacccggatttaaccattgatcgccaacgggaatttgataattaaaatgagaattggccgccatactgcgattcgtttgtttttggcggaaaaggactttattcggttgccccttttccgtaacgatcgcatcaatcgttaattggccaactgttgccggttgatcattcatcaattgtgccagaatagctgggttggattgattgttctgacttaatttgattttttgcaactgtaatttcggttgcgcatggaccgtcgcgctttcgcggagaatcatgccgatgcccattgcaaatttattcttaatactgaacccagcttgattcgttgcttgcgcctgaccagctgctaaatcttcgaaataaaaggcaccttctagaatccccgaataagccttcgctggcatttgcgccgtgaaagtgacttgcttcgtttcattgggttttaaagttattttttgtacatcaccaaaaatctgattgaactgatacggcgcagttgatagcacgcctaattcatgtcgattcatactttcttgaccatcatcagtcgtataccccgtattggcctcggccttgatggtcttcgattgattctctaaattcttaacggtcactgtgaaagtttgtttagcccccggcgccattaaaacgtcaaaataactaacggcttgattatattgattgctcggcaaattagccgtaaccgtaaaaccagaacccgcagctcgaacggtttgaacgccgccaaatagcatcatgaaaaaaagtaaactacttaatattaatttgaattgtcgttgattacgcatttatgctccttattagtcatctaaaaaagggccggcacttttgccaacccttttattgccatcattttaaccttggcttaccgcacttgattgatcatttgctaatgtccacgtcatagtgcctttatacgtaccgttctgcagaccttctttattcgttaaatctaactgagtaccagaacccaaagtcgcggtagcctgatcaatcccgttagtattagcctctttggcactccaaactaacgaatcaccactgccgattgttccaccattgaatgttgaaacggcatctgtattcgccaagtcggccgtaccagctagtgtcatcgttccttcaaccgtgcttgaaccattcttaaaactagacacattagcctttagattccattccgaaccggttccacggtaatcttggacaacgatggttggattaacagacgttttggcgtccattgctaacgatggtgtttttgttgctaacaattgatccaaagtcgcggattcaaaattaatttccgttggaacactaactaaacttaacgtcccaggattaaccgtaaaattggcccttgtcgtcgttttaccatccgttgtgtcatctgcatgtgcgataaccgtgttgcccaataccgttgcagctaggactgttgttgctaataacgttattcttgtcaattgcatgatggatatctccccaaattaaatagttagcggggtctataccgttatcgctataaacctgcccaattgaaataatttcagcttaatttttatcaaaagacaattagttcaactggtttatcattcatcgcaacggtgtttaaattttaaacattcaattatcatttcagctatttctggcagaccatttagcccttaaatttaatacaaatattacccaataaaatcggttaataatcctctaaatcggtccaatacgaccacgcaccctatctaccttacatatttatacataaataaaacaaattgaaacccatttcgccgtaaatggtcatcacttttttgaaataatattcattattaccatattttaacttctcatttgcacgtctcatcccttttagatatcattacgattcaatgattgttaatataattaatattgaattcattaaaaatattgtcatatcaacgttacgatttaaaaatatttattttgctaaatttgttaataattaataaacaatgttaatcaaattcactttttttcgattaaacctctataaaatgaatattccattaattgcagacgattatttagcaaaagaatttattttgtctattatttcatttgggacaattatctaattcatgtagagttgatttcgacttgctctaatagtattcgtcaaaatttaactgcttgtgctatctttaattaggttagctaaatcgcttaactgtcacgcgtacaatttaattttgcacgtgagttaactgttttacccattcgtttcctaataattcgataatttacttactcataattaatcaccgtcaagcacagtaacggttagtcgatactcaggcttttatctcaccgctagattcagtataattaagctatcgattactttggggggaaattcatgcgcacatggcaaaaggcaatcttattggcacttattattatcgcaataccattattctatttcgaaaatcgcttttttagtcaaaaagctcaaaccacaaacttgaaacaacaacaacaaaccactttacaggcttatcacagcgatgccagcgagcaatacgcggcgtttaaaacgtatttgcaacaggaaccgcaggcaaaggtctattattttattcctgagaacactcagaaccaaccgattgaactgttagatcaatccaaaaaactgggtgacaagctctatcaacaaatgagccaacaaaaaccggcgattaaacgtttaacgatttatgtgacttatcaaagcactaacattcaagacgacacttacgcgtttaaattatcagcagcagcttacggcgtgactaacaaaggctttaaaacagtctatcaaaaattggatcatttagatgcttctgaacaaatctataatttaagcgatcaaactaaaccggtcactttacaggcgttggctaaagacacctcaacgacagcaaccctcaaacaaattgcaatcgaccagctcatcaaagatcgcaattctgattgggacgctgttcaaaaactgcaacaactgaccttcagtgatcaatttgactataccactgacggtttaacgttacacttcaattcaaatccattaaaaatcactaaaattgagttaccattagaaatagttggcccctatctaaacccagattacgttccctctgatcaccaggcgaccgccattaaaggacgcaaaaaagccatcgccttaacgtttaatacaacgttgaaaccccaagttaccgaagcgattctgaaaaccttaacggataacaatatttcggcaacctttttaaccaccggtgcgggtgtcaaagcccatccagacgttctaaaagcgctcatagcagctcatcaaggcgtcggcacgcaaacctatgctagcgatgataatcccgctacgatggccacagcggactggcaagccaacgttctaaaaactaatcaggctttctaccaagcaaccggtaaactaccagcttaccaacgattaccacttgatacggccaacgcacaacttgctcaagccactcaacgaccattcatcgaatggagcgttgattcgcaagattggtcaaccacaattgatgcaccgacgattacgagtaacgtcttggcgggcgttagtggcggcgatgtcgtcctattgcacacgaccgatgtgacgaatcaagccttgccagaattgattaaacagctcacagcgaaaggctaccattttaccacggtggatgctttattcgaccaccagctaacgccgcaacaacaaatttttaaagtcggcgatcatcgtactttaaaataaaaatcagtactaggcagtcaactcaactcgcggtataatcaggataagcgttttcaaaaaccgtttacatccaaggaggatttatcgtgttaattggcagtattgaagcaggtggcactaaatttgtatgtgccgtcggaaatgaaaattatcaggtccaagatcaagtctcgattccaactacgactcctaacgaaaccatcaaggccgtcatcgcatactttaaacaattcgaattagacgcaatgggcatcgcctcattcggccccatcgaaattcgcaaaaataatcccttgtacggctacatcaccaccacaccgaagcctaactggcataacactgatttgttaggtcaaatcaaagccgctttcgacgtcccaacaacttggaccaccgacgttaacggttccgcatatggcgaatacgtgatgtccacactatctaatgaaaaaatccaatcactcgtctactacacagtcggcaccggcgtcggtgctggggccgtaatggatgaccattttctaggcggtatcggtcatcctgaaatgggccacactttcgttaaacgacacccatccgatttagattttaaaggcatctgtccttaccacgccgattgtttagaaggcctagttgccggcccgacttttgaagcccgtcttggtcaaaaaggtgaaaccgtaccgttaaccgaccccgtttgggatattttagcttactatcttgctcaagctgtgattcaagcaactttaatcgtgcgtcccgctaaaatcgtcttcgggggcagcgtcattaacgatatgttattagctaaagtgcggcaatctgtgactgaacaattgaacggttatgtcgaattaccaccactcgaccaatacattacccgccccgcaattgccaacaatggttccgcgacccttggtaatttcgcgttaggcctaaaagaattacaatcataaaattgaaaacaagctgtgacagcactcggttatcaattgagtaccaagttgaaataactgattatcccgaactaaggataatcagttattttgatttgagcggagattgatgagtgctagaacgcgattaaaaacaaaaaaattttagaaattgagaaaattctgacccaaaaacgtaattgaaggtgtagccgtcaatgcaaaacgccggactctgtcaatcaaatattgactataggaggtgagcgtcttgcgaaaaacaaaaggagaatcgttcatgagtctgtttttacagattcttgctgcggtcaagctaatcttggtcatctggaaacagatccaagatttaattgatcgcaataaaaaaagccgctagttagcggccaatcgaattttgcaatgcgactacgtgaggcgaggtgttggacgacaccttgcctcttttgcatggttttagtataacatggaattaatgataatggatgaaaaagaatttttagaagatgctcaaggtttaaatgcgcttccaagccaacttcttccgtttagctacgagtaatcaactatgactaaaaccggtcataatttattactctaggctatactcagaagttaaccaggcttgtcagcgctctattttttcaaatccacttcttctagtggaatcagctttgttttatgtttaattttgtaataggtaaatagcacgatgaataatggaatactcatgtagctgactccgatggcagtccaatcgaagttcttgaaggcttggatatcttggccgacaatcaccaatacgcataggaacaatgcaaagattgggccaaatgggaaccaacgagcgtggtatttcagttcactaacttcatggccttgcgctttgaaagcgcgccggaaacgataatgtgacacggcaatcccaagccacgcaataaaaccggttagcccactggcggcgactaagaataaataaattcgatcgccaaaaatactcgtgataaaggttaacgcgccaacaatcgttgtcccaattagcgcagcaatcggaatcccacggttgttagtcttagcgaaaattttagaagcaaaaccttgttcagccattgcccataacatccgcgttgaagcgtacattcctgaattagcggccgatagaacggacgttaaaatcacggcgttcataatgctggcggccgacgccaaaccagcacgtttgaaaactaaggtaaacggactaaccgcgatattactttcgctagcgcccaacaatgaatgactgtcataaggaattaaacaagcaatcacgaagattgataggatgtagaataataaaatccgccagaaaacttgtttgatggccttcgggatactcttttcaggcgtcttagattcgccggctgtaatcccaattaattcggtcccttgaaacgagaatccagcgacaacgaagacactcagaatcattggcatgccgccaacaaatggcgctttatggtacgtgaagttactcaacccagtccgatgaccacccatgatccccagaatcgtcaataacccaatggccaagaagatgaagaccgtcacgactttaatcaaggcaaaccaatattcagtttccccgaatgatttaacactaatcaaattgattaagaaaattaagaatagcgcgacggaactaaaaatccaaccgggaatgtctggtaaccagaactgcataacaattgcggcggtactaacatcgaccgctaaggtaatcgcccaattaaaccaataattccagcctaaagcaaaaccgagcgctggatcgacaaagcgcgttgcataagttgaaaacgaccccgaaacgggtaaatacgttgccatttcccctaaactagtcatcaagaagaagaccataatcccaatgccgcaatacgccaatagcgcaccaccgggacccgctttggcaatcgccgaaccacttgtgacgaataacccagtcccaatactcccacctaaggcaatcatcgacagatgtcgggtcttaagctcacgtttcatttcattttgtgccatatttctttcgctcttttcttcatagtttcaagaaaatcgcaccaactctgtgtcgattagcaaacaaaaagagtctttttgtctactaaaaacgacaaaaagactctacgtctcatttcaaccgttgatagcgccccgcaacaatttgttgcgacagttcttgatttattcaaccaagtcccaacatcaattgcattaagccaaccgacatttcggcaaattcccctttcacccttcctcatcgttgcttaatcaactgaaaagacttactcttggtttttgcgacctcttatcttgttaaaattcagtataacgaacttcaccaagtccgtcaatcacctttatgattttttcgatgcacttgaaacggcatctacaactggcatcgttggttctgcggacgctgccggagctgattgggttttcgaagcgctcgaaaccgcgtcaacttgaccgcccgctaaagtttgccctgtttgcgccaagtaccaatcaacaatcggtttgaaatcgaggatgtattcattaattcccatatattggccatctgtcgcgtgcaatgcttgatagttatggaccacgaattggtcatccccatgcttaggcacgtgcatccggacgacatcttgtttaccagcccgtaattgttgaatcacccattcaacgtgtttttgtgcggccttcggatgacatttcgccaacggattaccggcttgaccgggttggcgtggtgcgaacatctcgtctgccggttggcggtttaaattatagtagagcgattgattattgctgtcagcataggtaatttccattggcaatgacgccaatagtgcgttgagttgatcgacggttaatatcccgcggtcaagttgcacgtattgattacccgaaatcgcaccgactttggcggccgcttgttcgacccaatcttcagcttctttatcgatgccttcgatggtcgtgtcaattgaaccactcgccgttaaatcttcagttggcaactcttctggttggggctgattcatcgcctgtgtgactttaacaaattgcaggaatttacccagacaagtttgtaaaaaggcgaccgtgtccgcgtctttcaaattatgggcatcgtcgaacgcttctttaaccgtccctagcaagaattcattgccaggcatcacgaccgcgttgacccctggtgcatctagcacttggcgtaaatgcaattgcgcccgcgatgaaccttgatcgtaatacgatgcgccgacaatcatcactggtttaccatcaagcgggtggagttgataagacaaccattccaacgtatttttcaaactggcgggaatcgtatgattatgttccggtgtggcaatgatgaccccatccgcagccataatcttacgatttaaatattgaatcgccggattggcactttgatcatcatcttgactaaacataggcacatcgcgaatctcaagcacttcaacgtcaacgatttctgcaaaatgggtggcgatatatttcaacaataaccgattataagattgttcagcattcgaaccaacaattccaactaacttcatctgaaacactccgttctatctatagattctcccacgaaaaatgggccgcttctttttgagccatctcatgcgcatgattaagttgttcggtaatcccaacaaacacgagaaaatcggccaataaaccatcgagcttctgaacttgatccgcagatttcaattgaccgtgttcatcaaacgcggctaacgaattgcccaataagaattcagaactaggcattacgcgtgctttaatttcgggtgcatccaaaatctggcgtaaatgactttgcgcccgcgatgaacccaaaccaccatacgacgcaccgataatcatcaccggtttatcgagcaacggataaatcttatacgataaccacgctaacaaactcgttaagacggctgggactgaatgatcgtactctggtgtgctgataatcacaccgtccgctgcggtgattttagccgcaatctcagtcacggctgccggcacttgaaaatcgcttggtttatcgaataacggaatctgattcaaatcaatgatttcaatcgtcgcttccgattcaaaccgctgttgcataaattgcaatagttccctattcgtcgattgacgtgaattactacccacaattccgatgaactgtttcatctatatcaacttctttccgaagagtatgtgattaaataaacaaatataccttcttaatgataatcaatttcatttacaaaatcaatcattttaaactaagccgttcgacttcataatcgtgccattcgctgtcacaagaatgccttcaattcccggcgtcgcgttaacctgaactagaatttcggcatcgggtaaaccgaataaacgggtcgtccaaatttcaccggtgactgataaatcactgataatcgtcaaactcaatagatcggtttgaatcggataaccggtctgtcggtcgaagatgtgatgataagtctgaccgttgcgttctaaatggcgttcatagattcccgacgtgacgaccgattgattctgcaccagcaccacgtccaaatagacgtcacggggttcacgcggatcttgaatcccaatccgccagttgccatcagattggcgttgattcggcccataagctacgatattaccgccgagattgattaaggctgattgaaccggcaaagtcttgagttcgaccatgattaaatcagcgatataacctttcgccaacgcgcctaaatcaatcgccatccccgctttagccaagcggacttggtgggtatcatcgttcagttcaatctggcgtggatcaactaactgcatgaccgccgtaatttcggccgcactcggcacccgcgcatcatcaaaaccaatccgccaagtttgaactaacggcccgattgtgatgttcaaattaccattcgcagccaaactatgttgtttgcctagtttgattaattggtagagttctggtgcgaccgtcaccgcttgttgaccagcggctaaattgaccgccatcagttcggaagtgtcatcattggcgctaaaacggtgttcatattccgctaatcgtcgttcaactagcgcaataattggtgccggttggtcggcttcaatttgaatatcgatcaccgttcccattaaatagacctgactcgtttcaagcatttgaccactccttaattgtgattagcttaccatattatctaggtcatctcatccagtatctggctcaattgccctctaaatgagccagatacttcccataaaaaaagccaatcacatagctcgtgatcgacttccttctatattaatcattattccgttggttcatcttcatcatttttacgacgtttccatagtaaccagattaagaacaagatgattactgctagtaagccgataatgatgtatggccaccaattcgtctttggtaattcgaccgctttatcattgtacttattcgcttgttgacgggtaattgtgaattccttggtcagaacccagctgcccttgttacctttaatcgtcattttaagttgataacgtcccgcttttaacggtttattcttcaaatcaataccgtaattaaaattcgagttgggcgccatctgtaagtctgttttgtgattttgatacagcacctttgattggcctactttacgaatttcagctttcacatccatttcgccgagtgattcagcgcgggtgttttgcaagttagcaagaatcgccgtgtgcgaattaactaagcccggtttaaccgtctgcaagcgtagattgggtttaacggctggttgatcctcttgacgtaagaccactcccaccacgtaaatcgattgtttaattagagtctgccgttaaattaatggcgccatgttatttagcacgcaacctttcattgctacagacggctttctcgtcattttttacaattttatttattcatttcctgcaaatattaccccgaaataaccattttcggccactaatcgctaatctcatcataaattaatgaaccaccaaaaaacaaagaccaattcttacgaataacacgattcttgctgtttttagtgctagtttagtttttggaacaagcatttattccgataccaatatatttttgctaatcaaaaataaccggtaatcttaaaatcaagatgaccggttactactatcgttactgtttaattgataatcagaacggatgggtgcacttttttaacgtgctaatccatgcaagtccctgtgcttagctacgtttcgcaaacaaagtccataacccagactttattcacgaaactaggctaatgctcagaacttaccacatggatgagcactctaaccaaaacgcgcttttggttgcaacaacttccgcttaatctaaaataaccggtaatcttaagtacaagattaccggttatttataattaatgctcagttgctaccgcaaccaaaaacactctattttaaatttttaatgactttttggatcaacatttcgcgttgttcggccgattggttccagtcgatgactgggattgcttcgtggccgatggtttcgataattaacgccgaaacggtttgtttcttcaattcattggcccataacatatcggctttgtgaaacgctgcgttaataatcagcgtcccttgtttggcaaccggttggaaatcgttgaagacggtatccaatttgccggaatctggataagacttgatctgaccttcggtggctaaaacaacgtcgtatattgagacttcactcgatggacgtgccaaagtgaaaccaccgctattcccagaagccgatttaaccaatcccgccacgactaaccgtcgaataatcttgcgtaagtatgtctgcgagccacccaaacgatgatggatgacttctgatgagattgggtgttccggatcctgagttgctagcaatacaataatgcaagttgcttgttcaaaagcccgtgtcagttgcatcagtcttatcccctttttttgatgaaggtccctgaagcttggtctggttctgcttgaacctcgaaatcatatttctttagaatatgtgcgacctttttaaaactttcttgatcgaacgtactaatattaccattaatttgttcaatttcagctttattggctaaattacaaaatgcttttaatgctaattgtgctagaccgaggttttggaaatcataaacggctaagcgtgtttcagcacctaacgtttctaaaaccgtcatgtgcatttgttttttccatttgttcgtttcaaataagagttgcgcttgaaattcgaccttagaatgaccgaacttgtccacattagcgtacggtgtgtacacaaaaactgaattagttgtttgttgactaccttctcgataatcagtatacacgatgtactgattaactttctcatcattcgcttgattcatactcgatagaatcgttaaactagaatccgcctcaatttttgccagttttcttgcaaaggcttggtcattttcattcgccatttgataacccccatttgtctttcattccgattataccacaggttagtgataaaaagagcatttaacatggcattttaatgaaagcactttctttttaatcttgtggactttcagataattaaataacgaaagtactgcacggtttgaccgcctaaataggctggtaattgagtttgatagtctgcttgaaagcctaatttaagcaatagtttttgtgaatcgcggttgtctaagaagcacgcggcgttaaaaaccgtcaccgcttgtgtttgctgataatgttgcatgatcgcaggcaatgcggtgctcatcaacccgtgtttttgaaaggctggtaagagcgcaaaactcaattcatagccggccacactgacttggtcggccgctaaattcggtgccaacatcacaatcccacaaacttcttgcgtcgttttcaaggtcagcgcccaagcatccggatccgtttgcaacatctgtaaaaaacgttgggcttctgcgtcagattgaaacgccgtcatattcaacggttgcgtcagctctggattgctaccaatttggtagaccgcttccgtgtcgtttgattgaaatgcccgaattaataattgattggttgtgattatcatcccttaaaactcctttgaatcaactttttagcgcgcttaaactttatatttcggttaaggataggcaaaaaattagtcctagaccacttttttctttataattagtgttgaaattcacacagttgaaagttggtagccctatgacaattcgcgattatttccacgcattctccaccgtctcagaacaagctgaagcctatgactatctgattcaattcatcagtgacaccccagctgatctacatgattatccaaaaatcacccagatctgcgattgggcgacctacactaaaaatagttttcggatttggaccgattttccgattccagaattcgaatcccgtttcgtccaactaaccgggattaatcctagtgacttccaaattgattatagccataatttcaaagatagcaattttttctaaaacttgctgcttgacttttatagttatctatcgtaaatttaataacaattcttaaacacgtgtcattcaaaccaagtagtgcattatctgtgggtcaggaagtcggtggttgctgcgaaccgatcagggtaatgttgtcgaaatactgaatgctagtttcggtcgtaacaggtccgttatcccctgtcagagtggttcactgtcttaaaattggtgaattaactgggtggtaccgcggtttcctgatcgtccctatttcgcatatgcgaggtagggatttttttgtggaagcggaggagaccgatatgcaacaacgaacttgcggcggcttattacgatattattttttgacgattcaaccttagattacaatatgaaaaggatgttttagcatgtcaaaaaaatcaattagtttactagaggccagcttggtcttaatcggaatgttaatcattatgggcagcggcgtgattatttttcatttatcaccccaaaccccagtacttgccacgattgctttattaatgttgtgggcccgcattcaccgttttgaatgggccgagattcatggtgggattgaagatggtctcaaaagcgggattatcccaatcattatcttcattctagtcggcgcgctgatcagtacttggatggcagccggcgtaattccaaccttgatggtttgggggtttcaaatcgtcaacgtgcattggttcatcccgtcgattttcgtcgtctgcgcgctcgttgggagtgccatcggtagtgcttttaccgtgatttcaacggtcggcatcgccttcttcgggattggcgctaccctcggtttagatacgacaattgttgctgccgcgattatttccggcgcgattttcggtgataaatcatcccccttatctcaatcaactaatttaacggccgccgttaccgaaaccgatttgttcgatcacatcaagaacctgatgtggtccacgattcctgcctttgtcggcgccctaattctatacgccattattggccacacgtcacaagacgcttcgttgaccaagattcacacaaccgtcgcgattttgaaagctaattcacacattagtttattggccttaattccaattatcttaatttttgtttgtgcccgtttaaaaatgccggcgattcccacgttatttttgaatattgccgtttcaatcggcctcgtctttttccacaatccccacacatcgctccaaaccatcgccaacctcatcgaaaacggcttcgttgcgcatactggcaaccaaagcatcaacgctttactctcacgcggtggtattaacagtatgctcagcaccgtcgccttaatcatcctcaccttaaccttaggcggcttgctaatgcgactcggtttaatcgaacgcgtgatgacgcccttggccaaacatttgcaaacccctggtcaattgatcagcgcggtgattgcttccggcattggcgtcaacctctttatcggtgaagaattcctatccgtgattctgcccggcaaggctttcaaatcaacttttgaaaaatctgatttaagcaacctcgccctcggccgtgccctagaagacggcggcaccgtcatcaactacctgattccatggggcgtcgccggcgtcttcgccgccaacacactaggcgtcccaaccctcagctacctaccattctgcttcttcagcatcctctccccaatcttctcaatcctaagtgcagtaacgggggtggggctcaaacataaagagcgctgacaagcctggttaacttctgagtatagcctaaaatgatgaattatgactgccttttagtcatggttcatcatttgtagctagacggaagaagttggcttggaagcgcgttttcgttagagcgtgacttgagcgattaacctaagaagtccaattgtggttcggtctataaccatgattggacttctgtagttaaccggaaaagactactcaagaagcgcgtttagagcgctgacaagcctggttaacttctgagtatagcctagagtaatcaattatgaccggttttagtcataattgattactcgtagctaaacggaagaagttggcttggaagcgcgtttaaccttcgaacatcttataaaaattctttttcattcattatcattaattccatgttatactaaaaccatgcaaaagaggcaaggtgtcgttagcacctcgcctcacgtagtcgcattgcaaaagtggatcagccgctaattagcggctttttttattgcgatcaattaaatcttggatctgtttccagatggccaagattagcttaaccgcagcaagaatctgtaaaaacagactcatgaacgattctccttttgtttttcgcaagacgctcacctcctagagtcaatatttgattgacagagtccggcgttttgcagtaacggctacaccttcaattacgtttttggaacaaaatttttcttgaataccaaaaaaggttagtcctaatttttcggactaaccttttgtttgctttaattttagaagaggcccattaagaattggccaccgtaaacgagtgcgaaactgtacgcgataatcgatgcgggtttgcacaagatgataatccaggtaaatttcttcaatgacatttcggttaagccggccatcaaacataacacatcatccggtgcgaccggtaggaagatagcgagtgcgaagaagcgggtgaaatttttcttttcagtaatcgtgccgatatatttatcataggttttttcactaatcacgtggaggataaaaggtttgccgaattggcgcgccagcaagaagttaaaaatggaaccaatcgcaatccccacgtagttataaacgaaaccccagacgggcccgaagacgagcacgccggctgcggtactaatcccgcccggaatgaccgggatgacgacttgaatgatttgaatcgtgataaaaataatcggtccaaccatcactgactgccccaggtaatgctgtaaggccgttgtgttactgaataatcctaatcgtgaccaataaactgctagcgcaatgctgccgattaatgccatgatcgatgtcatactaatcaaccgtcttgagattaccgcactcatccccgtcaccctttctactatcactttatttataatttagcacattaacacgcgcgttgttgtccgtcgatagtctgatttataaaatcttaatgatttaatagccgacaataaaacagcgaatactaattcgtattcactattttataagacgcactaaccacaacgctaattttatgcctcgtattgttccaatattgctctaaatgggattaacccttgagcgtgatactttttaataaacgcttcaacggcttgtgggtcttgcgtttcaggatcaatcaccaattgctcaactggtaatggtcgttcgttagcaatcttcacatcgattacaaccggccccttagcgattttagcggctgcaaaggcggtttttaattcggttaaattatgcaccgtgaaaccttgtgctccgagtgcggttgcgaccgcaccgtaatccgcaccttggatggccacgcctgaatggggttggcctttatcatcttgttccgcctcaatgaatccgaatgaatcgttgcttaacacaacgttgatgattggcatctgatatttggcttgcgtaatgatatcttgcatgaccatcgtgaagccgccatcaccactgattgaccaaacttgacgatcaggaaaagcggtttgggtaccaatcgcggctggcaccgcacaacccattgtggcgtaccaagccgataaggtcatcttttggcccggatgcatgtctaagaaccgcacgccgtcgattgaaacgttgccgacatctaagttaaaaatggcatcgtcattcgccatttcattaatcgctttaaagacgggttcgacccgcattgggacttgatcactctcagtaaaaccagctttccaatcttcccagttggctttattagccatggcggcttggtagaaatcagttggcgtttccactgcttgactcgcatctagtaaggcttgtaaggccgttttagcgtccgccaaaataccgacatcgacatggtggcggtgaccaattttagtggcatcaatatcaatttgaataaatttagcgtctggtttgaagaaatacgcgccaaattcataattactaccaacgaaaaggattaaatcggcagctttcgctaaatcgacccccggtttggtcgcgacccggccagccgaaaccatgtaagctgggttttggtcagcgataatgcctttcgccaacgctgaagacatcattggcatttttaatttttctgataaagccccgatttgttgacccgcggctttggcaccttggccaaaataaataatcgggtgtttggccgctttaatcaatttcaaagcatcagtaatatcagtcgtccgtggtaacggataatggccttgttggaatagattggccgttggttcgaaattatcgtcgattgcttgccaacctaaatcagttggaatcgtgacgaccgcgacaccattgtgtttataggcctgttggattgcttgatcgacgactgccggcatttgtgccgcagtcatgaccgtccgattgtagaccgcgacatccgcaaacattggattttcattcatttcttggaaataatccgtgttcatcatattcgtcgctacttgaccaactaaagccaacatcggaacgttatcgtatttagcatcatataacccatttaataaatgaacggcaccaggccccgctgaaccaaacgcggcggcaattttacccgtcaccttcgcttcgccggcagcggcaagtgtccccacttcttcgtgccgaacttgaatataacgcattgttttttggcgattgtgtaacgcattcatcgtcgaatcaaaagagccaccaggcaagccgaaaatgtggtcgataccccacgcctccatgacttttaacattgcatctgatgcatttattttttctaccaattagaaagcctccaattaaaattcaacgttcatgtctattatacgagcatcaatgtaagcggtaaactaaaaagcattttaacgactgatttcagccgttttgactggtaacaaagacgcttttctgctatgcttgcagtgtcttagataataatgattattaataatgaacagttttttgaggaggatgttaatatggctattgaaccaaaagatgcccaagatgtttttaaagatgctggcgaaaatattatttttacaactcaggaattacaccgtaaggattatcaaagtgatcgcgatgcgatttcagaattggcggagcgtctcccagccattattaatagtatgaatatccgttatccggatgcgcatttaagcgttgcgtttgggattggttctgacgcttgggattatttgttccctaacgcccccaaaccaaaacagcttgaaccttttacaaccattccaagccccaaacacgatgcggtcgcaacgggcggcgatttgttctaccatattcgcgctaaagaaatggccgtttgttacgaagtcatggatcaattgatgcaattcatcggcgacaacgtgacaacgattgatgaaacccacggcttccgctatttcgaaggccgagcaatcatcggtttcatcgatggcaccgaaaatcctgcgattaacgaaacggctgaatacgccttagtcggtgacgaagatcccgaatttgaaaatggctcatacgccttttcccagaaatacatccacgcgatggatacttggaataagacagccactgaagaacaagaaaaaacaatcggtcgtaagaaattttctgatttagaattacgtgatgctgaaaaaccaacgaatgctcacaacgtcgtttcacaagacaacgaagacggcgttgaacataaaatcgttcgcatgaacgtcccttacgccaaccccggcgaaaaaatgaccggtacgtatttcatcggttattcgcgcgaatgggccgtcacgaaacggatgttaaccaacatgttcgtcggcaaaccagctggcaactacgatcacctactagatttcagcgaaccaaccaccggcgcgttattcttcatcccatcaaaaacagtattaactaagatagcggaagaagaaatttagagcgctgacaagcctggttaacttctgagtatagcctagagtaatcaattatgaccggttttagtcatagttgattactcgtagctaaacggaagaagttggcttggaagcgcgtttagagcgctgactcgagttggtcaggctttgaggattaacctaggaactcaaattacggtcgggtttaaccgtggtttgaattccgtagttaaccggaaaaggctactcgagaagcgcgttttcgttagagcgctgattgagcgtttaaaccttgagcataacctaaaaatctgcattatgatttgaattttaatcataatgcagattttgtagttaggcggaaaggtttgctcaagaagcgcgtttacaaagcagcccacacacaaaaataaaaacccgttaatcaatagcgattaacggatttttatttgcaaggacgattctttgactttcaatttcacacttggtaaactaccgtatacttactttttataagagaaaataatgaggcgatttgataatgacagatacgatgcaagccgttgtgattaaccaatacggcgatgaacaccaattagaaatggcgacattaccaatcccaacacttggtgcacaccaagtgttagtccaagtgaaagccacttccatcaatccaattgattggaaattacgcgaaggttacctacagaagatgttcgactggactttcccaatcgttttaggctgggatttagccggcatcatcacccaagtcggcgttgacgtaaccgattggcaagttggcgatgaagtcttcgcgcgccctgacaccactaatcgtgggacttacgctgaattcgcagcggttgacgaccatttattagcgcacaaaccagccaacgtttcttttgcagaagcagccgctgtgccattagccggtgaaactgcttggcaagccctttttgaacacggtcaattaaaggccgggcaaaccgtcttagtccaagctggttcaggcggtgtcggttcttacgcgattcaactcgccaaagcagctggtgcccacgtcattacaacgactagcgccaagcatttcgacctcgttcgcgacttaggcgccgatgaaataattgattaccgaactgaaaaaatcaccgataaaattcataacattgatttagtcatcgataccctcggtggccaaagtcagattgatgcttggcaagtgctcaatcctcaaactggtcggcaaatttcgattgtcggtcccgctgaacaaacacccgcaatcattgcggatacgactttaacctttaaagcgatttggttgatacccagtggcgctgacctgactgcgattgccgacctaatggcggccaaaaaggttaaatcagtgattgattccacaattcctttttcagcagccggcttaattcaagcccatcaattgagtgcgacgaaccacgcgactggtaaaattgtgattactttttaaatgaacaccaaaaccattaacaattcaaaatttgttaatggtttttttgttgttcagtttgcaaattaaccccgttaacagaaagtgattgcttaatgaatagggttaatagtataatttaagacactgaacaaaaggaggatgttttaatgcaaaattcaacaaaaacacgcgctgaactcaaaagcgaagttaagtcgctatttgctggccattggggattggccgtcagattaaacttagtaccagttcttttaacgattttagggctactgattagtgggatggcgattgtagcgctacttgcttttttcgtcaccacacctgatgtcatcagtagctcagccgatggtgccggtagcagtgctagttcaccattcggcagtaccatcggtagtttcgtcgttagcctgattatggttgggatcagctttacatccctcgattggttgcggactaaagaagctgactttggtgccttgaaaggtgccttcagcgtcttttcgaaacgctatttcttaggcgttttcgtgattcaattacttgttaatctttttactttcttatgggcccttttattgattattcctggaattatcaaaggttattcttattcacaagctaatctaatttttaaagatttaacggatgctgatccagaagctgatgttagctactttgactgcattactaagagtcgcaagttaatggatggtcataaatggcgcttcttcgttcttcaattgagcttcattggctgggatatcctcgcttgctgtactttcggtatcgggtatatctggttagccccttataaaaatgcaacttacgcagctttctacaaagacttagttgattaattagcaatagcgattctcaaacttgagaatcgctattttttgttgtacggtggagctaagataaaggacgtgattttatgaccattaatcatcaaataaccttagatgccgatttgaattggcaactcacttcaggaacgatcccgacgccggccgccgacgaactcttaatcaaagtcctcgctaccagtttgaatccggttgacttaaaacgccgaacggttactaagaccgtcctcggttatgacggctacggcgaaatcatcgcttgtggcaccgccgtcactgattggcacgcgggccaactcgtctattatgcgggcacgacccaaaaagacggtagtttccaagactatcaagtcgtgaccgccgcaatttgtgccttagccccaactggtttaactgtgtccgaaactgccggactccccctcgttagcttaaccgcttatgaactactcttcgaacaatttcattttccagcccaagccaatgctaatttaggcaaaaaactattaatcatcaacggcgcgggtggtgtcggttcaatcatgagccaactggctaaatggaccggttttgaagtctatgccactagtagccccagtcatttcgattggttaacaagcaacggcgtcggctttccaattgattaccataatgattgttcacataaaacgctagccgattatcccgatcaaacctttgatgcgattgccgttttatacgacatgactgactacctccctgaaatcacacggttaatcaaaccgtttggacaagtcggctcaattgtcggtaccgccgaaccactggcgttaacccttttgaaagccaaatcgatttcttttgcgtgggaatacatgtttaccaaaacggattacaactatcaagtcgcgagccaagggcagatattgcaacaaatcgccaatcttataacagctggcaccctacacccgatcacgacccaagattatcaaggtttgacggttgcgactttcgatgccatcgcggccgaattaacgaccggtcatctgcctggtaagaaagtgattgtttattaaactatggctataaaaaaggcgttaaattccggatatggaatttaacgccttttttggtttgcaacaacttccgcttaatctaaaatagcgaaccatgactgaaaatcgtcataattcgctatttttatgttgttgtcgaaacaacttaattagtatatcatgtgatggcattgaatgtcaaacattttttgaatattttttgtataaatattcaacttagttttttcacaacaccatctacttaaataacttgtgtctcactgacaacatagactactataacagctatcaaactgttcgtcaaactttttttaatcgagtcaattcagaactttcacccgcaaaactatcattagtatccgttatttatcgttaaaaatgcaattcattattatagatatgcatatataacgaacgataccgaaaattacacaaaaaaaacgccttaaaaggcgtttttaaaaaatattatttttcttcagttgattggttttcaggacgcattgttgggaacaataagacatcgcgaattgaaacagcatccgttaacaacatcgctaaccgatcaatcccaattccaagaccccccgttggtggcatcccgtattctaatgcttcaatataatcttcatcgataccttcggcttcatcattcccgttttcacgttcttgtgcttgggcttcaaaacgagcgcgttggtcgattggatcgtttaattcagtaaacgcattggcgtattcattcccatgcatgaacaattcccaacgatcggtaaaccgatcatcttcagtattcttcttcgctaatggtgaaatttcaactggatgaccataaataaaggttggttgcactaacgtatcttcaacgaattcttcaaagaaggcgttaatgatatggcccacttgccaatattcttcatatttaacgtggtgttcatctgctaattgacgcgctgtttcgatagtcatcgtttgccagaaatcaacaccggtttgcgttttgattgcatcaaccatgtgaattcgtgcaaaatcaccatcgagatcaatatcttgaccttgataattaatctgaccagtttctaaaactttatgggccacaaagcgaataatgccttcggtttcatccatcacgtctttataatcgaaataagcagcgtatgtttctaacattgtaaattcaggattatgtttcgtatcaatcccttcattccggaagacccgaccaatttcatagacccgttccatcccaccaacgattaagcgtttcagatgtaattcaagcgcaatccgtaggtagaggttgatgtctagtgcgttatgatgtgtaatgaatggccgtgcagaagcgccaccggcttgaccgtgcaagaccggcgtttcaacttcggtaaaaccatgcgtatctaaatattcacgaacggctgaaataattttactacgtttggtgaaacgtgccatactttcttcattcgcaatcaagtctaagtatcgttgacgataaatttgttcgacattcgttaaaccatgatatttatcgggtaatgggcgtaacgctttcgctaagaaagtcacgtgagtcgctttaaccgtcaattcacccatatctgttttcataatttgaccggtgatgcctagatgatcacctaaatcagattttttgaagatttgatagttttcttcgccaacggtatctttacgaacataaatctggattttacctgaacggtcgcgaatatcggcaaaacctactttgcctttgccccgtttagacatcatccgacctgcaatcgtcacttcttgattcttaagatctaagtcgtctttttcgattgcttcaaattcactgtgtaaatctgctgctaaatgtgtccggtcaaaacgatgaccgaatggatcgatgccttcatctttaagtagttgcatcttatcccgacggaccttaagttggtcattcatttctttttgattatctttttgtgccaactgacaattcctccattactttcaattatctactgtgttgattttaacacgaaaatagccccctgcggaagctattctgcgattcttgcttcagtttcttcaacaaaacggtctaaaatgtcgccgactgcttgttcagtttcgacttcattgactttcgccttcgttttagcggcgcggggaatccccttcaaataataagccgcttgttgtctgaactcgcgacaagccacattttcgcccttgagttcaactaaacggtgcaattgtaatttagccgttgcgattttttcgcgcggggttggttcggcaattaattcgcccgttcgcaagtaagtttccacttggcgtaaaatccacgggttgcctaaagccgcgcgaccaatcatcactgcatccgcgccgacttcgtccaacatgcgtttagcatcttgcggcgtccggacatcaccgttacccataaaaggaattgttaacgcctgtttaacttgttttaaaacatcccaatcagcgtggcccgtatacatctgttgccgggtccgaccatgcattgctaaggctgaagcccctgcccgttcagcagctaacgcattttcaacggcgaaaacgtgatcttcgtcccaacccgttcgcattttaatcgtgactggtttcttaaccgcatcagtgacgtatgacaccatttcataaactttatttggatctaataaccaacgcgcaccggcatcagtcttaacgactttattgaccggacagcccatattaatatcgataatatcggcttcggtatgttgatcgacaaattttgcggcttctactaaagtatctttcgaaccaccaaaaatttgaatactaataggatgttccgttggatcaacaaacatcatctctaatgtttttttattattatacatgatgccacgatcactaatcatttcgcagacgactaaacccgcgccgaattccttcgcagtcactcgaaatgctgcgttggtaatcccggccatcggtgcgacgacgacttgatttggaattgtgatatcccctatttgccatgtcattgtgccaaaccattcccttcgtgtctttcgacaatatctcaataatcatagcaaaaaaagaatcaactagcaaaaattttaattggctgcttgttccgctaaaatttgttgtaattcggcttcactaaattgatagcgttcgccacaaaaacggcaaacggcttcggcaccatggtcttcgctaatcaattgttctaaatcagcgggtttaattgaactcaacgctttggcaaaacggtcttttgaacaatcacaacggtatttgactggcatttgttctaacgtcttcattggcagttcgccaacgatttcggcaataatcgcttctggcgttaacccctgttgcaataattcagaaacaagtggcatttcttgcaaacgcgcttcaagcacatcaattaagcggtcatcggcaccgggtaacatttgaatcatgaagcctccagcgacttcaacagtattatcgtctttaacaaaaactgataatccaacagctgaaggggtttgttctgattttgccagatagtacgtaaaatcttcacctagttcgcctgatactaatgggacttgaccggtaaacggttcttttaaacctaaatctttcgtcaccgataagctcccagttgtcccaacgccacctttgacgtcaattttttgacggtcattcaatggtagattgacgtggggattttgaacgtaacctttaaccgtgccttgtgcgtcaccgtcaaccacaattttgccgacggggccatcaccttcgacgcgcacggtcattttcgtatcaccttttaaaccagccgcacttaatagtagtgtcccgacaatggtccgaccaaaagcagccgaggacgttgaccaagtatcttgtttctgctgcgcttcagctactaactgcgtcgcattaacggcatacgcacgtaattggccatcttctgaaatctgtttcactaaataatcttgcatcttaaataccctcttttacgattaattgatggttgagacaaaagaagctgtgacaaaacgatttgttttgtcacagcttctttcaatatctttaaacttgatcgtttgaatcatctgaatcgtcagctttttttggtgcttctggttctgatgttggggcatcgtctgccacttcatccgttttagagtcatcagttgtttcagcttcagcattcttcttagaatctttagcttctaacgcttttttagattcttcaaaagtcgctgctttttcacttggaaattcgtcattatcactttcaggcatcttgccatcattgaataagctcaaaatttctttttcgtttaatgtttcatatttcaagagcatttcggcaatcaacttatgttgtgcacgatgactttgaatgatttcaaaggcttgtttgtgggcttcatcaattaagcgacgaatttcactgtcaatcgttgcggcagttgcttcagaaaaggcaggtgcttgaccataagaagccccaacgaatggttggccttctttttcaagtgcgaccgttcctaaagctttggtcatcccatattgcgtaaccatgctccgagcgatatcggttgcttgttcaaaatcgtttgaggcaccagttgattcagcgttgaagataatttcttcagccgtccgaccaccgagtaaccctgtcatctgttcagtcaattctttcttagtcatcaagaactgatcagtcttaggtaacataattgcgtaaccgccagcgcgaccacgtgggacaattgtgaccttgcgaacgactcgtgaatcgctcaacactaacccaataatcgcatgtccagcttcatggtacgccactgaattacgttccttcggattaatgacccgatcccgtttagcggggccggcaatcacacgatcttcagcttcatcaacatcagaagcatcaatcttttgtttactacgacgagcagcgactaaggccgcttcgtttaagacgttttcaagatcggcaccaacgaaccctggggtttgttgggcaatcactttaagatcaacatcgtctgctaatggtttgttcttagcatgaactttcaagatggcttcacggcccttaacgtcaggacgaccgactagaatcttccgatcaaaacgacctggacgtaacaaggctggatctaagacatctgaacggttggtagcggcgatgacaatcacgccttcgttaccagagaacccatccatttcaaccaacatctggtttaatgtttgttcccgttcatcatgaccgccacccatgccggcgccacgttgacgaccgactgcatcaatttcatcaatgaaaatgattgatggcgctgcttttttagcttgttcaaacaagtcacgaacccgacttgccccaaccccgacaaacatttcaacgaaatctgaaccggaaattgagaagaacggtacacccgcttcaccagcgactgcttttgctaataatgttttaccagtacctgggggtccttccaaaaggacaccggctgggattcttgcacccaacgcggcaaacttacggggatctttcaagaattcgacgacttcgaccaattcttgtttttcttcttcggcaccagcgacatcagagaagcgaaccttattggctttcttatctgctttttgagcttttgatttaccaaagctcatcatcttgccaccttgaccgccaccttgaccggcttggctcatcatcatgtagaataatccgaccatgataataattggtaagaagacactgataatacttacccaccaaccagattgaggttcttggagtgtttcaaccttggttttactttgattcgccaatttcgtcatttgactaacttgtgaatcgctttgtaaaagcgtggttgtaaagtgcgttacttttttattattggttttttgaccaaaaaatgttgctttaggctgttttacagtttgtgctttacgatattctcctgaaattttataaataccatttgttggttgaattgaaagtgtcttaactttatcagacttcaattcactcaaaaatgtacttgattgaacttctgtagactctgaaccggagttgccattcaaaaagaatgaaaatacaccgactaaagccactaggataataatgtaaaacagactattactaaacagtccgttcttcttgttcttcatgcgtgacctcctgaagcttctcatcatttatgacacagtgtctctttgatactgttaaactataacatatctgactttcattgaccatttatttacctgaataaatttccggttttaaaacgccaattgtccccatattacggtaacgttcggcataatctaatccgtatcccacgacgaattcatttgggacttccatccccacataatccgaatgaactggcacgactcgtcggcttggtttgtccattaaagtacaaactttaattgaattcgcttgccgtgttttaaaaattgccattaagtagttcaatgtgcgacccgtatccacgatgtcttcaacaattatgatatcgcgcccttgaacactcgtgtccaaatctttgataatcttaacttctccggaagacattgtgccatcaccgtaactcgacacatccataaaatcaatttcaacgtgcaaatcaatttcacgaatcagatcagtcataaatacaatcgcgccttttaaaattccaatcattaaagggttcttgtcttgataatcagccgtaatctgcttgcccaaacgttcattaacccgttgaatatccgttctggtatacaaaatgcgttcaatatctttttctaacatcgttgagccagcctccgtttcagtaaaacctgaatattttggtatttaatcgcaacatagtacgtaccgtattttaccagtttgtggttgattaaacaatgctgaaacccgtaattgcggatgaccgattaattgattccgactccagacaccccagctattttgtcgttgcctttgtgaccattttaaatcgataaaaagccgtttaattgactttgtgtgttcgtgaccgattgccaaacgttccgacccggttaattgttgcactgtcaatggccagtctgttgatgttaaccaaatgacttgttgactggtcactttttgcgggagatgctctaaatcaaaaacaccaattcgttcggtattcggtagtgagcaccattgattgaccgtcaattccgcagactcagtcgttgcgactgactcctgcggtgaccctgattggatgataaattgatcgtaaaccttcattaaagcgtaatcgtgccccaaatcaatttggccctgcggtttagcttgttgattggtgaactgaatcaattcagttagctggttgctttttaaagcgggcaatccgggatactcagtccgccataattgttgccagattaatcgctgttggaccggcgtaaattgttgaacgattgttaaatcacccaccaattcagtttgcgctttatgcctcaccattaacttgaccaccgtcatggcccaatcattttgtaccgccaacactgccgataaccgcgtgctgaaccgattcgcattttgaataatctgtggattttcctgtttcaattgaggcacgatttgatgtcgaacgcgattgcgtagtaccgttaaactttcgtttgtttcatcttcaaaaaatcgaatggcttgttgtgttgcaaaatcgcgtaacattgctttactaaatggaagtagtgggcgcaccaactgccccggtccaaacagtcgtcgggcttgaatgccccgcatttcgtgtagttccccactacgaatcaacttcatgactaatgtttctagttgatcatcgccgtgatgcgccgtcaataagacttttgcaccggtcgtttgcatgaccgattcaaaaaaatgatatcgaaattgacgagcggccgcttcgatgccggttgtcggatgcgcgttagccggccaatgcgccacttttaaagtcagttcttgttgctgacagaattttctaagataattttcttcggcagcactttgtgtgcgtaattcatggttgacgtgggcgacaatgatgactggttttaacgccgttggtaattgcgttaataattgtaagaggaccatcgaatcgaccccggtcgaggtcgcaaccacgactttttcgcccggttgccaaaattgttgttctttaatcaacttctgaaacacttgcgtgagcatggttgccctccaatcaaatgaataaaggtcagattaaaagtttaacgaatcaaccttcaacctgacctttaaaatgacactactttatcaaaattaactacgacgaccgccacggccaccgcgtttaccttctgtattacgtttaattgtcgacaaacgatcttcgctatctttcaagaagcctgacaataaatcatcaaaatcttccttctgaggtgcgcttgcatgttccggcttgcgataaccaccaccacgattagtgcttggacgactactatgttgtggtcgagcgtgttcttgttctttcggttgatcgactgcttttctaatcgagaggccaaccttaccattttgatcagacatcaccttgacggtaacctcatccccaacgcttaatacgtcatgaatatctttaatataactatcagagacttcactaatatgtactaatccggttttgccttctcccaaatcgacaaaagcgccaaaattcgtaatacctgttactttaccagcaactttcgaaccaacttcaactgccatataaaactacgtcctcctaaaatggtcgtttgaacttatcaaacatttagtcacataatcgtgatctttaataaaataagtatagcacgctttagccctgaaacaagcgtgtttactgaattatttttgttgttgtgttaaattgggcgccttatcttgtggcaaactataaatcgtttccccatctttagaatagtaatatttatatcgaatgtattttgctaaataatcatcatcatgcaattgcttaacttcgatttttaaatcggactcttgcgctttagcttgtttcaattgcttttttttgaccgtttgtctctgttcaacattcgccaacgtttggtgcgttctaaaaatctgaacaccgcaaactagaactaaacaaacggctaaaatactaagtccaattagccggcgccgatgaacttggtgtacgtgtgctttttgctgtttcgaccgattttgggcggcctgctgttgggtataatcattttcaatttttgttattttctggctcaccacaaaacacctccgaattccaattgtgtccattataacaagttagcgaaaaccacgtcaatattgtttgccgattattaatgacttttattaataggctgaatgatattggtgatgattgcccattctaacgccaaaaaccaccagccaatccaaataatataggattggttggtggtttttattttaagcgctactcagcgactaaccgcaactcacggcactcttttgcttaaacgcgcttctatgttgcaacaacttccgcttaacctaaaatcgccaattatcttaagttcaagataaccagcgatttttgttaatgctcagttgctacccgcaactcacagcactcttttgcttaaacgcgctgactcaaccagcttcttccgtctagctacaaataaacgcggatgaccaaaattcaggccatccgcgtttattttaggctatactcagaagctaatcggttgagtcagcgctcttactttctattatttcatacatttctgctgcgtcgctctttttcgttgtttcgataatttgggtaatcttgacgattagggttttgttaccaaaaccaatttcaagcttatcaccgacgactacgttgctcgatgatttagcgggacggtcattaattaaaatccggcctttatccgcgatttctttggcgacggtccgccgtttaataattcgtgatacttttaaaaatttgtctaagcgcatctgattgccctacctttttatttttttagacagtcgcaacaattggcgaccgccaggaattgttaaccattcccgaattgtaaagagttgccatctgagtgctagtccaacaaagaccaacacaccaactgtaatgccaacgccagtactcataatcgccgcaccgcgcgtcattaatccaaaatgagtgatgttcaacgcaattttaactgctagccacatcatgccacagatcagcaataatttaaacgtaaaacgcttgggggccaatgcgtttttaaccaattctggtgattgacgtaagacaaggtacaagaccacgcccaaactaatgacagtccctaagctggctccaacaatctgaaagtgttgcactaaccattgattaatcataattttgacggcaatcccaacgagtaacgcaatcgtcgtcttataaaattgatccaaactttgcaagacactattacaagcgttgattaaggcgataattgcaatactgaacatgtaccaaactaacgcccggttaccctctgcatccccaaataggaagacattgacctgcggcattaaaaccatcaacccggttgcggccgcggccgataatcctagactaatgtgaattaacgcttccgctacttgccgaaattgttgattttgttggcgttggcgggcttgcgataagctcggaatcaaagttgatgaaaaagccatcgaaatcactaagcctaattggactaacggttgggcccgatcgtagacccccttgagatttttagcggccgcatcggttaagccccctaaaactaacccttttttgaccgtaaaagaatcaattaattgtaacaagacaattaatgaagcaaacaggcaaatcgaaccgccttcaatcaataatttcttcgccaacattttatacgactgccaatcgattcctttagtgactggtccacgccagacaaaagcgcgttcggccggttttaataaggaaatcgtcgccactaaaccgccgaaaaacgcgcccgtcatcgcccaagtgcccatttcatagactgaccaatgcaattttaacgacaaccaagccgccaaaataatcacgacgactcggacgagttgttcagccacttgcgaagtcgccgtcggaatcatattaaagatgccttggaaatagccacgcgtcacggctaaaaatggcatcaataggaacataaaggagaccatttcgattaacggtgctaacgctggatcggccatcgcccccgcaatcgccggggccttaatctgtagatagataaatatggctgccccgaatatccctaacagtgcgaatgactggcgtaaaattttagtttgttcggcgggctcagtttgctcagctactaatttcgaaatatagaccggaaaaccgctcaatgcgaaggtcatcccaatcccataaatcggataaatctgttgataaacgtaaaaaccggtgttgccgaccatattctgtaatggaattcggtaaaccgcactcaagactttagcgataaatgatgcaatggataaaacaaccgcacccttcatcaaattctgcatttgcttgttttgcatcaagtccctcctcgtctatttggctgcttgttgttcaatttttaataacgcttcgacaaacgtcactaattcttgtaaccaatccattaattgcatcttcggttggataatcagtttaacacttaatttttcgcggtcaaatccgaccgtggccttcaaacgcgtcgctgataatgcttcaaaaatttgttcgccagagactttttgactgcccttaggcgacaacgtcacttgtaaatcgcctttaacctgtttaatggattcaatcaacgcttcatcagcggtcatcttcaactgaccaatcatcaatagattcgcaacctgttcaggataatccccaaaacggtcaattagatcggcctgaatttcagcataagccgcttccgaatccatttgacgaattcgtttataaatttcaattttttgccgttgatcattaatataatcttctggtaaataagcttcaattttaaggtcaatttcggtattggttttggccgccacttttttgccctgtttcttagcaactgcttcactcaacatttgtgaatatagatcaaaaccgactgaatcgataaaaccgtgttgttgtttgcctaataaattacccgcaccccgaatcgataaatcgcgcatcgcaattttaaaaccggaacccaattcggtaaaatctttaatcgcttggagccgtttctcactaacttcagtcaacactttatccggttgatacatgaaataaccgtaagcgacccgactactccggccaatccgaccacgtaattgatagagttgtgataagccgtaatgatcggcatcttcgacaatcatcgtattaacgttgggcatatcaacccccgtttcgataatcgtcgtcgtgactaacacatcatacttaccttgaacgaaatcgtagatgaccccttccaattgagcctcggtcatttgaccatgggcatagccaacagttgcttcaggtaccaaagcttcgatttcagccgccgtttgttcaatatcactgacccgattatgcaaataaaaaacttggccgttgcgttcgagttcacgttcaatcgcttcacgcatcgcccccgcattttgttccattacgtaagtttgaatcgggtaacggttagttggtggtgtttcaatcaccgataaatcacgcacaccgagcatcgacatatgcaacgttcgtggaatgggcgtcgccgtcaacgtcagcacatcaacttgcgcctttaattgtttgagccgttctttatgtttgacgccgaaacgttgttcttcatcgacaatcaacaaccctaaatctttaaattcaacgtcttttgataggagacgatgtgtcccaatgacgatgtcgacttggccggtggctaaatcctttaacgtcgcgttgacttctttgcgcgttttaaagcgggataataagccgactcgcactggaaaatccgcaaaccgcgtcaacagattctcgtaatgttgttgagccaaaatagttgtcggtactaaaaaggcgatttgcttgcccgcttcaacggctttaaaagccgcccgtaaggccacttcggttttcccgaaaccaacatccccgaccaataaacgatccatcggttgaacccgttccatatcatgtttgatttcagcagtactccgtaattgatcatccgtttccggataaggaaattgcgcttcaaaatcggcttgcatttgatcgtccttcggaaaagcgtagccgcgttctgcttctcgttgcgcgtacaattcgattaaatcgtccgcgatatcttcaatcttagcagtgaccttattcttggtcttctgccattcgccaccacctagtttgttaactttcggcgtcttagcttcggcagaaacgtatttctgaaccatgtttagttgcgtcactggaatgaataacttgccattatcccggtaaacgattgtgatgtaatcttggtgaacgccgtcgacttccaacgtttccatcccgacgtattcaccaatcccatgattgacgtgcacgacgtaatcgccgggtttgagttcgctataactcttaagccgttccgcattcgctaacgtttgacgccggactttctttttgggtgcggtgttaaagagttctttttctgttaaaacgactagtttcaaatcgggtaattcaaagccgttttgtaacgaaccttgcacgatttggatttgtcccggtactatttgcgttttgttggcaacgaccgcttcgatttcaaagtcgtggaaggtctggtcgattttcttaacccgtttttgatcagagacgagcacaatcaccgtttgcttttgtttttgccaatgactcatttcggtctttaataacggcatctggctaaagaactgttgcacattacgcgttggcagattggtcaacgcatctaattttaaattgcccatccctttttggaatagcgataaatacagttggggatgctgatcttttttaatcatttcgtgagcatctaataataacgtctgcgttggtaacaaccgtcgattagcgatcatatcagtttgccaattcgcggcttcttcatttaagatccgttgtgtttcttgaatccgcggataatcgtcaaaaatgacgagcccacttttcttgaagtagttaaataaattatctttttcgggatataaataatcaatgtacaacgccaaattttctaaccgttcgccggcttgcaaccgttcaatcggtgtctcaaaattagttgctaacaattggcgttcttttttgtccgtaatctgttgggcgtttgcttgatacgccgcttgtagcgcgtcccccgccattgcgagttgggcttcattggctaacaaatccgtggccggcatcaattgaatccgttcaacgttttcgatgctccgttgagtatcggctgcaaacgaacgcattgaatccaccgccgtatcgaacaattcgattcgaaccggattttcagcgtctaatggaaaaatatcaacgatatccccccgcattgcaaattcacccggtttcccgaccaatttatcccgaagataacccatttcacttaactgagttgctaacgtcgctggatcgatttcactattgctgtcaatcgtcaattggccatcttgccattggcggacagaaggtaacaaacgacgcatccctgcaatcgaggtgataataatcccctttttgccagtgaccatgaagcttagtgttcgaacccgctccgctttggcttctggcgaactggttgccatttccgccgccatcacttcttcaactggaaaagtatagatttgatcactattcacttgattagctaaatcttcggcgacttggttggcctggaaagtattactttcaataatcaataacggttggcgctgttgtttataaaccgtcgctaaaaagagggttttcgctgaaccggataatccggtcagcaactgtttacccccttgttgttgattggctaatactgtttgaacctgttgggtttgccctaacattgcgattaaatccatgactaattccctatctttctcaaaatgaccgtacatagacgtgcttctttgaacaatcttctccgcctaacgacagaataacaatcatggttaaaacccaaccacaattatcattcttaggttatgctcgaagattaaacgctcaaagcaacactctcttcttaaacgtgcttgtcagccagtttcttccgtctagcgacggttagtaaatcataaccaaagtccggtcataattcactaacctaggctatactcagaagctaaacggctgaatcagcactcttttcttaaacgtgccgtcaatcacaaattcctgcgcttagctacgtcacgcaaacgaagtcctaaaaccagacttcattcacgtgactaggctaatgctcagaatttaaccgtgattgccagcactcttttttaaacgtgcttttgcttccaagtttctgcgtttagctacgctacgcaaacgaagtcctaaacccggacttcattcacgttgctaggctaatcctcaaaactttaccgtcagcaaaagcactctagttatataaattcattgttttcataaaattatcgttttgacaccaatcgtcgatggcttcgcacgcttggtcgattgtttgggcgatcactggagcggcgtctttatcaaacttcgttaatacccagttaacaaccgtacttttttggggatgttgaatcccgattttaacgcgtttaaaatcttggctctggacactggcaataatacttttaatcccgttatggccaccagctgatcctttttggcgtaagcgtaacttaccaagtgtcaaatccatatcgtcttgaatcaccaataagtcagcaacatcaatctgataatatttcagtaaaggcccaactgaacggcccgaatcattcataaaggtcaacggtttcactaaaaaaacagtttccccttcatatttaaaactaccgtactcagcttcgaaatcatgtttgtttaacgtcacgttatgttgtgcgcatagttgatcaatgaccatgaaaccaatgttgtgtttcgtttgtgcatatttgctgcctggattacctaaaccgacgatcattttcatcattaaaacctctttttaattaataaacacggtcaatatcaaagcaaaaatactgagaagcgactcctccccagtttcccgttgactatagccataattataccatatctgattttctttctatattaggaaactattagttttctgaaaatttaatcaaaatcagcgaacattcttgtaaattatgctatactagttttcgaaatgaagaattgatagacagaagggacgtcattatattggcaaatattgaaaaagatcatcaaaaagtaatcctagtcggcgacggcgctgtaggttctagttacgcttatgcattaactttacaaggtattgcacaagaaatcggtatcgtagatatctttaaagaaaaaacacaaggtgatgcaattgatttatctgatgcattagctttcacttctcctaaaaagatctatgctgctgattactcagacgcaaaagacgctgacgttgttgttatcactgctggtgcaccacaaaaaccaggtgaaacacgtttagacttagtaagtaaaaaccttaagattttgaagactatcgttgatcctatcgttgaatcaggctttaacggtatcttcttagttgctgctaacccagttgatatcttaacttatgcaacatggaaattatcaggtttccctaaagaacgcgttatcggttctggtacatcacttgattcagctcgtttccgtaaggatatcgctgaaatggtcaacgttgatgctcgttcggtccatgcttacatcatgggcgaacatggcgacacagaattccctgtatggtcacatgctaacatcggtggcatcaagatttctgaatgggttaaagcccatccagaagttaatgaagaagaattacttaagatttttgaaagtgttcgcgacgcagcttacacaatcatcaacttaaagggtgcaacattctacggtatcggtactgcattagcacggattactaaggctatcttagatgatgaaaatgctgtcttaccattatcagtatacatggatggccattatggcttgaacgatatctttatcggttcacctgccgttatcaaccgttcaggtattacgaacatccttgaaattccattgactgatcacgaaatggaaagcatgcacaaatcagctcaacaattaaaagatatcgttacaactgcttttaaagaattagatatcgaaactcgccaataatttttaattaacggccaataaaatagtgtgccatcacttcttttgaagtggtgacacactattttttattgaacaccgtgactaagtaccccctagttaaacttggtttagcggctgttcttgatgattaatctggcttaaataatgattgacatcagccattaaattcaattctttgatatcaatttcatccccccacatcaataattcatgcttaatcgcctcataaatatcgttgccttcgggtgtgaccgtcacccacattaaacgttggtcttcctgttcaccgcgaattttatgaattaattttttagcctgtagaatatttaattttctagagactgccggcattgatgttttaaaaaagatggctaattcgcttggcgagttgcgatcctcttcaataatttgttccaagactaaaaattgttcaaaactcaattcatgtttttgactaatcccatttaaattattggaaatccgttgtaatttcgcataccatgcccccaacaattgcatcttcttattcggtatctctgacataagttatcccccgtatcaaaataaacctgcgactatcttattgattaatcgtgacaccattaaacgaataacagtggcctattttaattttttattgatcatttattttaaataacagccattctaaaaatcatttattattagtttttatagacgccaattcataactattaaattattgataatcctcccaaacaaaccaatgttaaaaatatatatagcagactcccttcgttaattgttagcttaagccttactgttctttgctttgcacttaacaaatcttatattagcgcaacaatatcttctgtgcaatgaataattgttaaaagattaacatagaaaattaatggctttaattatctggttgtaacggggattctacttttttataaatccgaaataacacctactatcaacgatatgtattcatcaatatttcaacattaacttaattgttttgattaatcatctttttaataaattgtttcgcaaagcactatttaatgtgtcgccaatcagtctttttattttttgattctgtgaattcgtttaatttaaccttaaaattatctgattttgaaactttttcatttctttttaaagataactctagtatgcttactaatagttaataccctttgtaacatttgaaacattgcggtatactaagcacctattcagataaagattggagttattactgtgcagtttaccaaaaaactttatgtcacgttagccggtgtggtagttgttctagctggtggctacgcgttagtcagccatcactatcaatctgccttcttaccgcatacagaagttgccggtgtcgatatcagtggccgatcagtggccgaagccaatcaagtcttattgaaaaaggtcaataaccagaaatatacgttaaaggaccaacagaattcagtcctgacgtttagtggtcaagcggccggctttagccataattttaaaccactcctaaaaaagatgcgtcaaacgcaaaatggttggacttggttgagtcgttccttcggcgaacaccaaacaacgaaagcggaagacgcccttattttggacactaattcattcaaccaatttgctagccagaccgtgactaagctaaacgcctcgcgaacagcttccaaaaatgcccaggttgacttaactgggactgattatcagattaccaaagaagtttatgggaatacgattagcctcgctaaattcaaaaagactgtcgcccatgggattaatcaagggacaaccaccattaatttgcaaaaagactatgatcaacccacgattaaatcaactgatcaaaaattgcaaaagacggttaaagaattaaccacgattgcgaatgaaacgattaattattctgtcgatggcaataccttccaagtccctaagtcagagattcggagttggttaactgaacaagatggcacggttcagcttagtaagaccgctattactaattacgtcattcagatgaagactcaatacgatacctacgataaaccattgacctttaaatcaactaagcaaggcactgtgactgtccccgccggtatttatggctggagtatctcacaagccgatgaagttgctgctttgatgtctgaggtccctaaaggcaagagcttttcacggaccgcagtaattaacggctccggaatcgctaacaaaacccgaagtgttggttcaacctatatcgaaattgataaaaaagcgcagcacatgtggctctatcaagatggtaaagtgacgattgaaaccgatattgtcacggctaagccacctcaagtgacccctagtggtgtttggagtatctggaaaaaggaacgcaatgccacgttaaaagggactaattccgatgggactgcgtatgctagtccagttagttattggatgccaattgacgaaaccggcgttgggattcatgattcttcatggcaacctaaatacggcggcgattggtataaggaacatggttctcatggttgtatcaataccccaccagcaaccatggccaaattatacgatgctgttagcgaaggtattccagtcgtcgtcatttaaaaataaccacaaaaaaacaatccgatttggattgtttttttgtgcgctaaagatcggaattctaggctaaaatgtgcttctcaagtagccttttccggttaactacaaaatgggtatcatgagtaaaaaacactcataatacccatttttaggttaatcctcaaagtctgaccaacttgagttagcactctatcctaaaacgtgcttctcagctagcttcttccgtctagctacaaatcgggcgttatgactaaaaacccagtcataacacccgattctaggctatactcagaagctgaacagctgagtcagcactctatcctaaaacgcgcttcaacccacagcttcctgtgcttagctacgtctggcaaacaaagttcatagaccgaactttattcgccagactaggctaatgctcagaagctacccgtgagttgtagcgctctatctttccgtaatcatcaatacgccgtcgcctagtggtagtaggctgctgtatagggttttatcaggtaagactgtttcgaataattcgtttagtttacgatgaataccccgattgcggtgttcaatttcatttttaggtaagaaaattgtcccgccttgtaacacgtcatcaattaacaagacgccgcccggtgctaataaccgtaggcaatctggtaagaattcaatgtatttcgatttagccgaatccataaaaattaaatcatacgaaccggttaacgtcggcagaatatcggcggcatcgccgtttttttgcgtgactttgtccgtcaatcctaatcgttcgaaattagcggccgcccgttcgtacattaattcatagcgatcaatcgtcgtcacgtgaccactggctggcatcacactcgccattaacgccgctgaaaagccaatcgccgttccaatttctaaaatttgttgcggttgtttcatcgccactagttgttgtaaaaaggcgacggtctcatgcggaatcaccggaatccctttctcgtgggcctgtgcttcaagttcgccaagcggaccatctagaacagccactttggtacgcataaaatcgaggactgcttgatcaacgaccggttggtgcatcattttattgagttccatttctttttcaccatctcatcaatatttaatatttcttcactaaagacagaaactatttatgttaattctaccaatggtatgctatgattacatcagtatatgagagaattttaatctaaggagctgtgcctatgctaatcaaatcccttgttttacccaaagaacgtttatcgaccattgaagaatcggtcactttagaagaagcattaacccttttggaagaatctggttaccgttgcgtgcccgttttagacgctagtggtaagattttccgcgggaatatctacaaaatgcatatttaccgtcataaatcacaaggtggcgatatgcaattacccgtcacaagtttattaaaaaatatgacaaaatacattccagttgatgcgccatttttcaaagtattttttaatattaaagatttaccctacatcgctgtcttagatgaagatagtaatttcttcgggattttaacgcatagcacgctgttgaatatgttgtccgaagcttggaatcttgaattaagcagttatgtgctgaccgtcctatcagccggcgaacaaggcgacttagtggcgatgtcgaagattatcgctaaatacacgtcgattgccagctgcatgacgttagatgccaaacaagacgagtttgttcgtcgaacgctcttcacgttacccgctggtttagatatcgaaattttgaagaagattattagtaaacttgagaaaaaaggcttcaccgttcctgaaattgatgatttacaatctggcaaagcccttcggaacgatgccgatgaaatcgaaaacttaatttaacaaacaaaaatgacgtcctcttttaattaaaggagacgtcatttttttggctattctcagaagctacccgtgagtgtcagatgcttcaatcttaacgcgcttctcaagtagccttttccggttaactacaaaatcagcattatgattcaaaatacaaatcataatgctgatttctaagttaatcctcaaagcctgaccaacttggatcagacgcttcgattttaacgcgcttccactcacaacttcctgtgcttaactacgttttgcaaacaaagtccataacccggactttattcacaaaactaggctaatgctcagaagctacccgtgagtgtcagacgcttcaatcttaacgcgcttctcaagcaacttcttccgtctagctacgaatcgcaaattatgactaaaaccagtcataattcacaattctaggctatactcagaagttcccggctgatcagcgctcctatttttaacgcgcttctcaagtagccttttccggttaactacaaaatcagcattatgattcaaaatacaaatcataatgctgatttctaagttaatcctcaaagcctgaccaacttggatcagcgcttagttcatttgttgtttgaagtgtaatactttatcgaccgcatacataatcggtgcggtaatcgtcataatgaccccttccgaaatagcaagggatagataggttggccagaacggtattttcgtgctagcggttgaacccgttaagacaatcatccacgcaattaggcacattgaaacggtgaataggacgatatttaacaccatcttttgccacgtctgctttaaatacggcatgactagcgttaaaaccagtaacgccaatagggtttgaccaccgccaaatagcgtatctaataatttattttcagaactgaaaaagaaattaaagacgattaccccgccaaagacgccccataaatatttcttattgaagacgaccaaatggttcaagccttctgaaacccgaaattggatggcgcctgacgcaaaacccaacatccctggaaaaagggacaacaccacatacagagctgccaccaagccattcaaaatgacttcgcgcagccgactttgattcgtcattaaactgcctcctagtttttttacgtgggatggttacgaaccacgttttctacagcaaaatctattatagcacaaaaaacgacctgatctaaaaatagatcgagtcgttccttaaagctgtcttttacttatgtattaaggattcagaaccggtttcaaccccacgctaatcgttaaggctttatcgaccttagccattttgcttgcgattaaatgggtcacccgatctttgagccgttgtttatcaatcgttcgaatttgttctagtaaaatcactgaatcccgctcaatgccgtcttccttagccgtaatcccaacatgtgttggtagctttggtttctggattttggcggtaatcgctgcaacaatcacagtcggactatggtgattaccaacatcattttgaatgactaataccgggcgcatgccaccttgttctgaacccacgacaggtgataaatcagcatagaaaatatcaccacgttgaactactgccaccattcagatccctccattaggataaatcaactgtccgaatgtgggcgtaagcttcacattcacactcattgaattccgcggcaatctgactattgatgctggccatctcagcatacccactaattaatccatcgacctttgcttgtctcgtcaccataaattcacgtaacgcgtcttgaattaaatcattttcatcaagcgcataaacttcgcaataggttttaatttcttggaccagtttcgcatctaaattaacggatagttgtgcatggttagcattcatcatcattagcctccgaattcaactctttttaaccttagttcatcctaacacagaaatcatgatttttaaatattaatgtcgccagtgattggttgataaacgcgtggcaatcgttcggctaagtcacaggcaatttcataatgaatggtccctgcgtaatcagcaacgtcttgtaacgaaatcgactcattaccactgtttccgaccaacaccactttggtatcaactggatattcatgaggtaaccgaatcatcaactggtccatgcaaacccgaccaacgacttcgcaaaattgcccatcaactaagacttgtgacccctgcatccggcgtaaccaaccatcggcataaccgattgggacggtgccaatccattccggactatccgcagtataagtcgcgccataaccaatcttactccctgacttaacttccttcacgaaacaaagctcagattcaacccgcatcgcaggtttcaatggatatggaacctgttcaatggctttacctgatggattcaaaccgtacatgctgacgcctaatcgaatcatattaccattacaagccgcgtgccacaaactcgtcgcggaattcgaaacatggacataccgcggttgttcaggcaagactgccaacagcgttttaaagcgtgctgattgttctttaaagtaggtatcatctggatcatcagccgttgcaaaatgcgtaaagaccccttcaaaatcaaaataatcattgtgggtttgcataaattggtaagccgctaataattcggaggcatcccggaaaccaatccgccccatcccgctatcaatccccaagtgaacgtgaatcgggcgactatttttttctgattttaaaatgtcataagcttcttctagccacgttaatgaaccaaccgtcactgaaatctgattagccgccattaaacttgcgtacgatggttgggtaatgcctaacgttaaaatcggttcggtaaaatcggcgcgtcgtaaatctagcgcctcgtccaaaattgccacacaaaaaccggttgccccagccgcttcagccgcctgcgctactggtaccatcccgtgaccatagccattggctttaacaactgcaaaaatttcagtctcttgattctttaattgcgctaattcattttgaacattttcatagatggcttgttgattaacaagcacccgtgtaggtcgtaaatatccgactgtcatgaagtctaacctctttctaaaataacttctgcgatcaccaatgtatcggtgtgtgataacgagacatggacggtcccgtcgaataacgattgacgaatatacggcttaccgtgcgcatcattcagcgtttcgacatcttgtagcccgacttggccgatgccagttccataggccttactaaacgcctctttaaccgcataacgccccgctaaaaattctagggcgtgcttgggtgaataactgttaaataacgccagctcagttggtgttaatactttttgcgcaaagtgggcatttttagtctgtgccttttcaaatcgtgcaatctccgccaaatcaacacctaatccaataatcatcgtcttactcccaacacactagttattttaatttagtttaccacaatcaacagaccaacagaactaacagcttcgtcacatatttgatgaagcggttacttgatgaaattaacaaccaaaaagcctgcgacggtaaattccgtcgcaggcttgattgatttattcagttgccaaccggtttagtcagcgctctaaacgctcttctagcttgcaacaacttccgcttaatctaaaaagcgaaccatgactgaataccgtcataatccgctatttttattaatgctcagttgataaacgcaatcaaaagcgctctattcttaaacgtgcttcttgagcaaagttctccgcctaactacaaaataagcactatggctaaaaacgccatagtgcttatttttaggttaatcctcaaagcctaacccattcgagtcagcgctctatttttcgtttgttctgattgtgaagttccgttttgaacggccttcaccactttttttgtggttgtcattactacggttatcgttgctacgacgtttgctgctatcgccattgccaccgttgctacgacggccatctttgttaccttcatgacgtttgccgtcgccattgctgctgccgccactaccgttacgacgattgttgccacgatagccaccgccaccgttgccgccgcgacgtttgccgccaccattaccatgatgcccgccgccgttaccgccacgattaccaccctttttacgtgaaggtaatggacgttctggtgtgatcttaacgggaacggattctttactgatcgtcttcaaaagaactgaagctaattcaacatctgagaattgttttaataattcttcagcgtcttcattgtacttcgccaattgacctttatcgatcattgaagtgatatcagcaactgatgctgctaattgacccttgaaggcttctttttctgaaggtggttgtaaaggtaacatccgtttcttcgttaagtcttcgataatgcgtaggtattccatttcatttggtgttacaaatgtcacagaaacacctgatttaccggcacgaccagtccggccgatacgatgaacatagctatctggatcttgaggaatatcatagttgtaaacatgcgtgacgcctgagatatctaaacctcgggcagcgacatcggttgccactaagatgtccaaacggccagccttaaatgatttcaagacgctcatccgtttttgttgagataaatcgccatgaatcccttcagcattataaccgcgggctttcaaaccacgtgttaattcatcaacacgacgttttgtccgaccgaagattaacgttaattctggtgattgaacatcgaataaacgcgtcataatatcgaatttttcaaaatcttttgcacgaacataatattgatcgattaaatcagccgttaattcttttgacttgattttgattgtttcaggatcagtcatgaaggtcttaccgatcttcaagattggtgctggtaacgttgctgagaataaaagtgtttgacgtttgtcaggtacttgtttgatgatactttcgatatcatcaacgaagcccatgtctaacatttcatccgcttcatccaaaactaatgtttgaacgtgatctaatttaaccgtccgacggttaatatgatccaataaacgaccaggtgtcccaactaaaatttgtgggtgttcctttaatgaacggatttgacggcgaatatcagcgccaccatagacaacttgaaccttcgctttacggtcgcgacctaaacgatagagttcttcttgtgtttgaatagccaattcacgtgttggtgaaatgattaaagcttgaatattagggttttctaaatctaagttttgtaagattggtaaaccaaatgctgcggtcttaccagtccccgtttgcgcttggccgataacgtccttgccagctaatgccaacggaatagtatcgctttggatgggtgttgcttcttcaaagccagcgcgttcgatggctttcatgattggttctgttaaacctaattctgagaatttcaaatagtgttcctccttgttttgtaaaaaacatcccaattacaaaacaggtccactttatcagctacaccattttcaaaaatctgtcttgtaatataattgttttcaaaagcctttttcattaaaaaagctccttaatagcttatcacgctcgccgttaattagcaaacgcaattaatacttattttaacacaaatttgcgttaaaacccgattagacagaaaaaacagctgaaaacttattttcaaactgtttttttatgtcattattcagttaaagccgtcaccacttgttctaaatgtaatccgtgactcgcttttaaaacgactaaatcggccggttgcacgtcagttagcaacgcttcaattagttccgattgttggctcttttcaaaataatgcaactgcgctggggcatacgtcgtcatcaatttttcgtagagtggtcggatctcatccccatacagataaaccgtttggatttctgcgggatttaaaacggtcgctaaactttcatgtagctttttgctggcggttcctagttctaacatatcgcctaaaacggcgattcgtttaccctgcgtttcaaaatggctgaagttatgtaacacttctttagccgccgtcgggttagaattgtaaacatcgctcaacagccgttcacctttagtcccaactaaccattccgttcgattccgggtgacttcaaatttagccaatgatttttgcatcgtttctggtttaatgtggaatcgttgaccaatcaaaagcgcaattaacgcattgttgacgttataggcccccatcatcggaatttcaaacgtcatttctggccattcgtttaatttaaaagtcgtactcgtttcgcccgcacgcacttggagcggataaagcgtgttggtggtcgaaccgccaaacgtttcgctgtccaaatcgcccacccgttcgttcaaaagtggttcgtccccatcataaattaacaacccgtcttcatttaagaaatcggtgatttccatcttggcatcggcaattttatcccgcgttttgaaaaactcgatatgggcttcaccaatcatcgtaatggcagtcacatcgggcatcacaatttcacttaaggcgtgcaattgtcctggccggtccatccccatttcaacgactagaatttcagtgttggcttccatcgacagaaccgtttgtgggaccccaatttcattattaaaattggcttgcgttttatgaatattatattggctccctaaaacagcagcggtcatatccttagtggtcgttttaccattgctcccggtaatcgccaccactttcggattaatcttacgtaaataatgcatcgctaattgttgataggcaatcagcggatctttaaccaccaagattggaaaatcggtcggttgattcgcatgatcacttgcccagaaagtcgcaactgcgccattggcttgcgcctgttctataaaatcatgtccatcccgattaccggctaaaggcacaaataaagcccctggtcgtaattcacgagcatcaaacgccacactagtcacttctaatgtttgccattgttcagtttcattgattgcgccggtcactcgtgcaatttcacccaattgcattttcatatatcgatagctcctattaattaaggtcccagtaacggaccattttttatcagtgcttaattgactaagccatattgtaccataaaaacgttcggagtactttagacagcagataagttttgaatccgcttaatagtgcaccgaataaccatcgggctcaatatctttgttttgataaatggcttttgaggggctccgccatgcgttaaatgtttcttgtcgcaatagatgatcatagcgtttcggtggccaactatccaattgaacatgggtttgatcattttgatgtgcatagttaaacgaagccccgttcaataattgccgacattgcgcgtccgtcaactgatagtcaaccggattactgatgactaaaccatctgccgattgttttaaaaccgaccattgactgataaactggccgtgttcatcgattaaccattcactatgaaaatccggtgtcagccgtttacgattcggaaagtcattggggattggttgaccaatccgatacttattgtgaaaccgcgccggttcacgacgcaaccaatactgcgggttcgcttgttgccgattcgcgacaaattgggccaaagcttgttcgtctgtttgaccgttcttttgccagcaacgacgaatatattgttcgttttggcgatccagatacagcctaaactgatgtaatcgttgatccgttaagggtcgctgccgaaacgctaattgaacacttttggcaaataacgttaaaaacggcgcatctggtggcatcgccggatcaattcgaaattgccgactccgtaattgtaaaaaatgatgactgtctaattgtgcttccagttgattcaacactaaattagccttttgccaattgataacacgattcgtggtttgtcgcccatatgcttgatataaccgcgtatagagcggcgatccaattcgatgtaacccactattattttctcgatattgctgtaccgttaaaggacgttgcttaatatatttggcgtaagcgcgtaaactagctagatcccaattagcttgttcaagctggttaaaatgggcgactaattgcggctcattttgaatttgataccgactggcagtggtctgttgccagattaactgtagttttttaaccccggctggctgctgactcaacgcctgaatgattccgctttgcaaagtgtttcgttggtccgtcgataacgtcaagtaattgtcttgatcgtaggccaatagtagttgaccgcgaacaatggctaacagctcttccaatccggccattggttgttgtgctggtggctgcaatagactgattaactcactttgtaaaatggttaattcgcggattttctgtcgcatgttagtcaccaccctttcagttcaattatacgaaattaaccgacaaaagccaaaaaatcgccagttatcttaacggtcaagataactggcgatttgcggatgatgctcagaacctaccgtgtgcatcagcactcactcatttaacgtgcttttggattacaataatttccgcttaacctaaaataccaatcatcttcagttcaagataattggtattttctgttaatgctcaattgctaaacgtaatccaacgcactcatttgctttaacgcgcttctgcacacaggcccttgtgcttagctacgtctggcaaacaaagtctataacccagactttattcaccagactaggctaatgctcagaacctaccgtgtgcatcagcactcactcattttacgtgcttctcagccaaattcttccgtctagctacaaatagcgaatcatgactaaaatcagtcataattcgctattttaggctatactcagaatttaaccggctgagtcagcactcactcattttacattgctcttagttttgctactcggtcttcgattggtggatggctgtcgaatagatgcgaggccttccctttgaacggatctgagatgtagagtgccgaacttgatggatcggccgcttgcatcggttcgctctccgaaattttcaacaacgcattgattagcccttcaggattgcgagttagctcaacccctgacgcatccgctaaatattcgcggtttcgtgacaacgccatctgtgctaagctggcagccaatgggcccaaaatcatgagtaagattgaaaaaaccatcgcaatgacattactaccgccattatcgcgatcatcatcccggtcacgacctgcgccgccccaccagaagaagttattcccgatattcaccaaaatcgaaatcaccgccgatagcgccaaggcaatcgttgatagtcgaatatcatagttacgaatatgtgacacttcatgcgcaatgacgccttctaattcttcacgattcaatcgttgcataatcccactggtcacagcgactgctgcgtgttgcggatcattgccggttgcaaaagcgttggggctgtcatcttcaacgataaaaacccgtggcatcggaatttgaccgaccatcgccatatcttcaacgatgtgccataaatccggatactgattcgcgtctttgatttcaacagcgtggttcatttgcataacaacatttgtcgaattactaatcatgattaaaatatagacaatggctagtactgccgccagggtcacgccggttagcatattattcataaacagatacccaatcgcgcccccgattgctaatactaatgcgaaaaaaccgattaaaacgtaaactgttttgcgtttattttgtgcaatttgttcatataacatttttaatcacactctaatcgaatgaaactttaggaaccgctttttcttcagttggtgtttctaagtaagccactttttggaaattatgggcaccagctaaaacgttcccggggaaagtttcaattttgttattaaaacgcgttgcacttgaattaaacaattgacgggcatacgcaattttattttcggtattcgttaattcttccatcaatttgccaaattcagcgttagcttttaaatcaggataactttcagataacgcaaaaatactcttcaacgaatccgttaattggttcgataccgccatcgtttcttgacgattatcagctggcatctcgaccaattgattccgcattttgataaccttttctaatgtttcctgttcatgtttggcgtaacccttaaccgtcgatagtaaattcggaattaaatcattgcgccgttttaattgcacatcaatttggctccaagcttcttccgtccagttacgacttttaaccatgccattataggtactgatataaaagccagccgcaccgaccgctaataaaattacaattacaattaaccacagcatcatacattcctcttttcttagatattgtcttcatagtatcagactccgcacgacaaataaagaactgttaattaattttacaaaaattcaaaagatgtccgaagcatgttaaactaacagtaataccaatccacttaggaggtctctttcaatgtttacgattcatcctcaaattgcggatagcggcctcacagacccacgcttcattcaccccaacgccaaattacccgcaagttacgtcacgttgtgtcaaaaaaccaacggcggctttctacaacgtttctggttaccaaccagtgaaccaactagcgacggcttagaccacgttgaatgccactacatcgctggtcttgcgactgagcaccaatcggtcattgattgttcagactttcccgcttatctaattccgtttagccaacatcaaacccaatacttcgcgtttgattatcaacagaatccgactaatccgagcattcgctacattgatacggaagtcgatcaatggttaaccgttgccgactcatttgaaatttttctcgcacagttaggtaccaaagcgattgatctatccggaattgacgaattcccgttaacccctttacaacgaaaccactacttattagtggcacaccccagcgaattgaccactttactggaacactatgaaagtgatagtcctaaagattggtttttaagttggctccaatttttcgtccaacacggcacattagcgcaacaaaaatgtgcactagctgctttcaatacccaacagctctactttagacgccaattaccaccaacactcgctaccgatttacagcacgctttcaagcagttcccgcattagcaaccctgtacgaccaatacgcggctaaatggtcgttcacttattaaaacagaatcgagatgacctttgtatgttggcaaacattcgtcaacgcctattcagacgacgtgaacaatgggaacaaaatttaatcgtcctgtggtttggcaacttcatggccggtgttgcttttagtttaatcatgccgttcatgtcactctacatcgacacactcggcgatttcacgaaagccgaattaggtctttggagtggtttaacctacgcgattactttcctagtgaccgccttaatctcaccttggtggggtaaaattgccgatcgacgcggccgtaaactcatgttactgcgcgcctcacttggcatggccgttgttttaggcgcgatgggcctcgtccaaaacgtctacgaattaattgcactgcggatgttgcaaggtgtcttttccggttacatcagtaactcaaacgccttaatcgcaacctccgcacctaaagccaaaagcggccaagcgttaggcaccttaaccaccggcagtgtctcggggacgttattaggccccttactcggcgggattatcgccgaagcgaccggttatcgaacgactttctttattaccggtgcgattctaatgatcgtcttcttcctgtgtttagcctttgttcacgaagaatttacgccgattgctaaaggcgaccaagtgcctggtaaacaactattgcaagaattgaaatatccacacctgattatcgggatgtttgtcaccaccatgattattcaagcctccaacaattcaatcagtccgctactaagtctgtacgtccgcgaattgatgcatcacggtcacaacgtagccttaatcagtggggttatcgccgccattccggggattgccaccctggtggcggccccccgctttggtgcattaggcgatcgaatcggctccgaaaagattttgattgccggcttaatatttgcggttttcgtctatattccccaagcgtttgttcaaaacgtttggcaactcggtggtttacgattactggtcggaattgccgatgccgctttgattccccaagtccaaacgatccttgctaaatactcaccccatcaatcggccggtcgtatttttagctacaatcaatccttccaagcgatgggcaacgtcgccggtcctttaatcggttccagtgtttccggcctctttggttatagcggcatctttatttcaaccaccgttttaatcatcgtcaacctattatgggtcaaccaaaataccaaagtcttacgcaatcaacgcaaacaaaaagcttagcccaaatggactaagcttttttgattgatttaatataggttaatcctcaaagcctgaccaactcaatcagcacttatttttttaacgcgtagttactcacagattcctgtgcttagctaagtctggcaaacaaagtccataacccgaactttattcaccagactaggctaatgctcaaaatctaaccgtgagtaccaacgctaaaaaaatgaggcctaatctgaaaagattaggcctcatttttttagtgggcaataacttgtggaatcggttcttgtgcatgttgttttaggataaaaattttgagtaacagcggagcgattaaagttgtgacgacggttacgataatcatcgctgtatagtgagattgatcaattagatgtgcattgattgaaacctgagcaacgactaacgccatttcaccccgtgacaccatgccagcgccaataatattacccgattcagatgaaaagccacatagacgagcgcctagccagccacccaattgtttaccaattaaggcaatgataattgtgattaggatgaatggtaagttcgtactgagatgggctaacttaacgtttaatccgatactaacaaagaagaccggaataaaagtgctataaccaatggcttcaatttttgccgataattctgctttatatttagtttgtgaaatcgccaatccaatgaagtaggcccctaaaacatcactcataccaagataagttgctaaactagcaaaggccaagcaaagaacaatggcaatgccgcttagattctcagtggcaataagatgtttggaaagtgaaaggattggcgggactaaccattttccaaaaacaaatgctaggacaaagaagagtaatttaggcaaaattaaaccgattagatttaatgaattagaatgggggcctgcaaaaacgctggaggcaattcctaatagaatgacacagatgatatcatctgcaacagctgcgccaagaataaccatcccttctttagaatccaaatagttcatttcttttaaaacttgaatggagatgctgaccgaagtggcacttaggattagaccgataaataatgcggtactaatttggaaatggaacattaaaacgcatacgataaaagcaccgatagttgggaagataacacccaagatagcaacgactagagaaggtttccaatacttcatcagttgggttaaatcgccttcgataccagcaataaacatgagcaaaataacgccaatttgtgcaaatagtgtgacaaaattatcggtgtgaattaaatttaacagcgccggtccaaaaataatcccgaccaataactcgccaatgactgttggtaaattaaactttgcaaaaatgtgggagaatagcttagttagtaagataataagtgtcagtgtgattaggaagtccatattagacctccgataaggtgactaaataacggtgaagcatttttaattccgaatgacattctgtaggcgtcattggatactcgaggataatcggaacggttgaatcaatttggcgacacaacaaccgccaatcagtttgaccatctgcaagtaggactgtgtcttgattcgtaatatttttaagatgcagcaccgtcgtcacttgatgtaattgagtcatggcttcttcaggggactcattaatccaataccaattaccagcatcaaaagtaaaaccggtttttgtatgaagttggtgcaatgtttgacagacagccatgatatggcttaattgaccatgttcatttggttcattttcaagattgagcgcaacattgtaagtttcgatataatgatttagaacagtgacctgttcaatggttggttggtcaatctcacctagactgatttttaaagcacagattccgaatttttgggcgagtttaaaataattttcaagctcaggattaatttcttgattaatgaataaacattctggaattgaaaagcgaaattcaatttgacgctcaatggcgagttgttgaagactggcgagttcagtttcccgtgtactatcagtaaatcgttcaccccgaacttcaaaaccatcaatcttttcagttaaatgggacagtagctcatattgagaatatccttggtcaagttgttcttggaaaataatggtattaattaatatttttgtcatagtctccacctcataaaaaaagctaaattgcagactcatccctttgtgcggaatcgtcttaaatttagcggttaaatattaagatgaaatttaaattcagtatagcattatttcagattcatgcaagcgctttaattaaaaaaacgataaactgccccaaatagtgcagcatcattaaaattttgagccacaattagttttgtttggtagaagttgggtggtaggtagctttgagtggcattattgagtagttgaatcaaatagtttccctgttgtgacacaccaccgcctataattagtacagctggatcaacggttagaataatttgagcaagaccctgagccactgaatcagcccattgttgaataattgtaagcacggctgaattaccattttggctttctttaaaagcatccggaacgctaaaaccaagttgttcgtgtagttgtttttcaagtgttaaagttgaggctctttgttcataatttgtttttgtttgtggatcatagagtaaataaccaattgaattcgcatgggagaagccaccgtcttgaagttgaccattcaacaagtaagcaccgccaatacctgttcctaaagcaacacaatacacattatctaaatcttgagccgcgccaattagtttctcaccaagtaatgctgcgttaacatcattttcgacatatacgggtagattaaactgattggtaaggatttgtttcaattctgtaccttgataattgggaattgttgggccagcataactaatttttccggcttgacggtctacaattccagctgtgctaataccaattccgattatttgatgagtttcacatagcgctgaagttttttgaataatctgatttagaattgcttgatgagcattatgaaaagtatctaatttccctagaaaagttagttgtttatttaaatcaattagaccgtatttaattgaggtaccaccaacatcataggcgatgtagtaagggccagtttgcataataatctctccgttccatttgtaagcgttaacaaaaaagtcttgacttttaaagttagcaatgattatatttaaaacgttaattgatttatttttcagttggagtttagcattaatttaaaattagtgcaaacacgcacattctaaaatgtattgaccgcacaataattttagaggtgaaactaatgaataaaatcggttttggaacgttaaattgggttgtcttagggacgtatctgttagcaatgttactagttggtgtttattttacaagaaaagctagtaaaagtacggatgccttttttaaagcagaaggtaaaataccagcatgggcagcagggtttagtatttacgcaacaacgcttagtgcaattacatttatgtcgacaccagaacaagcatttttgcaagattggtcctattcgctaggtaatttaagtattattgttttgattccaattttaattaaattctatgtcccattctttagaaaactgtcagttacgacggcgtatgaatacttagaacatcgatttaacccagttatgcgggttctaggcagtattttatttatgctgtatcatatcggtcgagttgccatcgtcatttatttaccaatcttagcaattacatcagtgactgatattaacccaattgttatcgcattattcgtcggaggattatgtattatttatacttttcttggcggtattgaaggtgtcatttggagtgatgtcattcaagggatattactgctaggtggtgcgctattagtgattgcagttgggactcattacatcaagggcggtttaggaactgtctggaatgacgccattagtgatcataaactattatcgagtcttgattttaaaacgaatatgttatcgcgatttataccgctaatttttgcgggtcaattctttaacggtctatatcaatatacgggtagtcaagatgttgttcaacgttaccagacaactagttcgatgaaagaaacggttaaatcattatggacgaatggtttcttagcttttattacaattccaattttctatgggatgggaaccgtgttatatagcttctatacacatgcagcagtattgccaaaagggtttaacacaacagcattagtgccctattttattattaaaacgttaccggctggacttgcaggcctagtaattgcggccatttttgccgcagcacaatcgactgttgcttcaagcttaaatgcaatttcatcatgtgccattgctgattttagagttcgattcttcaacaatcgatttaaacaattctcagatgtgacttgggctagaattattatcatcatttctggattattgagtttaggggttgcaatctatttgatggtttctgatcaatcacaaacatggaacttattcttagccattacaggaatctttggtgtaccgcttgctggcatttttgcagttggcatttttacgaaacgtgcgaattctacaggcgtattagttggattaattgccagtgcattcttgacttattttgcacaacgcagcgaaatttcaccgtttgttgttagctgtgtttcctttgccagtgcgtttatcattagttacgttgtcagcttgatctttaaaaagagtaataaaaacattgttggtttaacggtccaaacaatcaatgaagaatatcaaaaataagaaattagacgataattcatttaattgaattatcgtttttttattgaaaggacagcgagtctcaactattcggaaatcttttccattttagatcattgatgaaaataaagtgaccggttattctaaatgtaagcggttaatacaatttagatgagatttgattcatcaggtatcaaatggttattttagacgaagatagaaggttgaagaggttgaagaataattttttagaagcagttaaaggcaaattaattatctcatgtcaggcattaccaaatgaaccgttacatagttcatttatcatgtcacgaatggcaaaggccgcagctgaagctggtgctagcgctattcgatgtaattcggtagtggatgttcaagcgattcaagggattgtcgatttgccgattatcggattagataaagtagattatccggatgcaccgatttacattacaccaacgattaaagaaatgcgtgggattgcgtcaacgggcgctgaggttgttgcttgtgatgtgacaggacttcctcgaccaaatggtgaaactttagcccaaattgtggcgacgatgcggtctgaatatccagatacattgctgatggctgatacagctagtttagatgatgttcgagaagctaatgaacttggctttgacatcatcgggacgacgatgtacggatacacaccggcgactgaaggtcataatattgctgatgatgattttgcttatcttaaagaggttatcaagctggcaaaggcaccagtgattgcggaaggtaaaattgatacaccggctaaggttactagagtgttagaattaggctgttatagcgtggttgtcggctcaattatcactagaccacaattaattgctgttccatttgttgaagcaactaaaggtttaaaaaaatagagaagaaggttattataatgaaaaacttagaaaaatatcgtggcgtgattcctgcattttacgcttgttatgacgaagctggagaaatcagtccagaacgggtacaagctctaaccgaatatcacattaaaaaaggggtcaaaggcgtctatgttaatggttcttctggcgaatgcatttaccaaagtgttgaagatcgaaaagtcgttttagaaaacgttatgaaagttgccaaaggtaaattaacagtgattgcccacgttgcggctaacaatacgaaagatagtgttgaattagcgaaacatgctgaaagtttaggggtcgatgcgattgctgctattccaccaatttattttaaattgccagaatattcagtcgcagcttattggaacgctattagtgcaggtgcacctaatactgattttgttatttataatattccacaacttgctggtactgaattaacacaatcattatatgccgaaatgcgtaagaatccgaacgtgattggcgttaagaattcatcaatgcccgttcaagacatccaaatgtttaatgccgctggtggcgaagatcacttagtcttcaacggtcctgatgaacaattcttaggtggccgtttaatgggggcaattggcggtatcggtgggacttacggcgcaatgccagaactattcctaaaattaaatgccttgattgcagctaaagaattagaaacagcacaacatttacaatatgcaattaacgaaattatttataaactttgctcaggacacggtaatatgtatggcatgattaaagaagttttacggattaatgaagacttagacttagggtcagttcggttgccattagaaccattaaatcatgatgatttagcgattgcacaagaagccgctaagatgattaatgatgctaaaatgatgtatcttaaatagataaaaaattagaattcaaaaaccttggtagggtaataagcaggtagaccagtatattggtttacctgctttactttataagtaaagcatattatatttaagaaagcgctttattagatgggggataggcatttatggaaattattgaacatattaaaaatcaatattcatttctatcaacgcaagaacaaaaagtcgcattggcagttattcaaaaaggtagtaccatccagcatatgggaattgaagaattggccgaagaattagcggttagtaattcaaccatctcacgctttgttaaaaaaataggttgtaaaaattttgtcgattttaagcttaggttcaatgatcatcagaatcaagtaccagttgaaggggtacaaggaatgattgatcaagatgaacgaacctctgttgaaatctatcaactgtaccagacggtcattaccaaaacgcaagaaaagattgatcaaacggatttagaaaaattagttaaatggataaaagagagtcggcggatttttatttacggattagggagttcgggctatacaaccgaagaatttgggcagcgtttagttcgaatgggaattcaaacgattacggcgaccgaaagccatatgatgttaatcacgtcgaatattattaatcgggatgacttagtgattggtctttctaactcaggtaatacgaatgaggttaatcgagcgttgaataatgcccggttaaacggtgctagaaccgccgcaatcacaagtgcgccagatagcttaatgacggcggcgagtcagttaacattgtttgttgaagacagtattcaattctctaatgaacggtttgttaattcacaatttgccattacgtatgtgattgatattctatcaatgttgttattagaagatgatcagtataactggagcatgcaaaaaacggttgaaactattatgcatgataaattaaaccatcctcagaattaaacgtcaaaaaagcacgttaccgtttagcggtaacgtgcttttttagaatgattatttatttttttcagctaatagatcgcgaatttcctttaaatagagttcttcttgagattgaaccaaggcttctggttcttcttcggttgagctgcccatatcgcggagtttattaaaccctttgacgattaggaaaacgacgaaagcgatgatcaggaagttaataatgtcgttcaggaagttcccaatgccgaagacggcttttgtgccgggaatggttaaggtaattcctgataaatcaacttggccgatgaaaagtgcaataatcggattgatcaagtttttggttaatgaatcgacgatggcttttagcgcagcccctagaatgaccccgacggccatatctaaaacattaccgcgcataataaattctttaaactctttaatcataacgtaaatcctccttataaattagtcagtacccttgactaaaagtataccgtattcaagtttcaggataaatagatatgctattatttgcagaaaaaatcattttgattgctattttcatgtaaaatagtaagatagaacagtgatattctgaaaataaagtgtaattgaggcagaaaaatatgaattggttagtacaattgtatcaaccgttttttgaattgaataactggcaaacggtcattcaatcatcagaagattggttattaattttaacgttagtcattatggaatgtttattatcagttgataacgccgttgttttagcggctcaaacccagagcttacccacaaagattgaacaggaaaaatcattggtttatgggttatggggcgcttatgttttccgatttatcattatcggggtcgggacgtatttgattcatctatgggaaattaaagtactgggttcaatttatttaatgtatttggtctttgcgtatttcagaaaaagccgacaccctaagttagcgaaggaaccagaaaaagcaaaaatcagtagtccgcaccgtttttggcgagtggtggcgtcaattgaattgatggatattgttttttcaatcgattctgtcttagcgtcacttgcaatctctagtaatccagtgattgtgttaattggtgggatgattggcatcctatgtatgcgagggattgcccaaatgattgcgcaactaatgaagaaaattccagagttaaatccgatggcgtacgtgttgattctgttgattgcggttaaactcttcttatcaattccagcaattgattttgaaattcccaatttagtgttcgctgggattgttttcggggccattttaatcacacttggcattcattactatcgagtacatcacaataaacaagcttagatagcgtaaaaaggcgtttcctcatgagggaacgccttttttgcacactattaatgaagtcgactgaaaaaaacattggcaatggccaataggacactccccgccgagatgaagatgaataggcgctttttcattgctaaaatcgcgataaattcacgaatcgtggcattgggtagaaaatacttagacgttttagcaccaattccatcggcttgtaaagccgcttgtttagcgaataaactggcgcgaaaagtgtggtaattattggtactaaagataaccttagggtttggtttgtcagtatcagcagcaatgacttgttttgaaaactgcatgttttggagcgtgttaactgatttaggttccaccaaagtttgttcaaccggaataccttgggcgattgcgtaacgttgcatggccactgcttcgggtaatttttcatcggaaccctggccaccggaaaagacgagtttaggcgcggcatggccttttttgagttggcgttgatagaacttgatggcccgatcgatacgactcgccaaaagtggcggtacgatctcgccgttgattaggccgctgcctaagacgatgatgtaatcttgttggtaacgaggccgattgaactggtagataatcagtgatgataaatacaaatagaagaaaagtggtaaataaagcagatggacggtaacaattgtcccaatgaaaagttggattagcttgggaatgtggagcgcattcgcaatcgacggggcgaagaataagaaaatcaaaccaaggccgatgaataaggtcaacatgttggaaaaggtgtgactttctttttgccagacgacataggcgttccacaagaacaggacgaatccaaacgtatatagaaataaagcgataataacaaaaacaatcatggcggcaatggcgatggcgttaacgatttgattattgatccgaatgacgaggaccgccagtgccattaagccagtgactaataagccattaaaaacaatcccattgatgaatcgccgtttatcttgccattgtaaaaaaacgaaaagcagtaagaaaaaaagtggcacgaagccaaaataatcaaccgtttgtgacatagtaaaatctccaactcattttatttagttgataaagcgtgttgttcaatggcgtaagccacgccatcttgtccgagatgattgctcttggtaatgactttagcaatggcttttaattcgggaatcgcattgtccattgcgacgggtaggccagcgtattccagcattgataaatcattaccttgatcaccgacggccatgacttcatcttgttgaatgcctaatgcattggctaaatcgcggagaccgttccctttgccggcatttttattgaggacttctaggaaataaggttcgctttgaacaaattggtattcgttaaaaatgtgttcaggaatcttagctttagcttccgctagaattgcgggttcgtcgattaacatcgcttttgaaaaagctttgtcgggtgcgatttcatcgacgtggcggaatttaattggcatgttgacgagtgcgctttcgccagtggtataacgactgatatcgcgatttgcggtgtagatgaattgatcgtcttcagcatggagatggacgccaatttggcgcgataatgattcgatttctaaatattggttatgcgtcaaggtatgccggaccagaatttcaccactggccgtattttggacgagcgcgccgttaaaggtaatcacgtaatcagaagcttcggtaagccctaattcttgcaagaaaggtgtgacaccggtgaggggccgaccggtacataacactactttaatcccctgagtcttagccgtcttaacgaccttgatggttttagggctgagaacattattttcattgagtaaggtaccgtccatatcgacggcaacaagtttgattgacatagtttagtgctccttttaatcagttgttggtttttgcaatgaaccgttgttaatgtagcgtttaaattcttgataaatcggttggaataattcaatgtcgctgttggctaacatctctttgggaaaatagaaccgttcatcgcccgaaaacttacctgaaatcgcagcgactagtggacttaaggaagagagttcttctaaagtaccatcggattgcatgatttcaatctgggtctttggcgttttagatgagggatcgtaagcatcgtaggggaggtcgaagctattattgacggcggtatagtaagttgcgtcatagccggcctgttcggttaaagtctggagttttggcaaatagcgttcagtttcagttgtaaaacgaactgatttgaatggtcggcgactaagaaatcggttagccaagtcattgagaatctgatcgggatagtccaaccaataaatgaaataggtgttcaagacgccatcatccaatttgagatagtcgtctaacgtaaactgcttcttaaaaaaaggaattagtagttggggtgctaagttttgcgcgtgttcgggttgttcgtaaagcattttggcccgttggagtagtcgttgtaagacgacctccatcccgcgggaaactgggtgaaagtaaacttgttgatacatttggaaacgactgacgatataatcctcaacggcgtgcatgccgttggcgagaaaagcaatcccgccttgataaggtcgcatgacgcgtaaaacccgggttaaatcgaattcaccatatttagtccccgtattgtaagcatcgcgcaataagtaatccatgcgatccgcatcaatctggctagaaatcatctgcaccacttggggattcggataggtgtggtcaatcacacttgcgactttttgtggaaagtccggggccactctttggaggatttgattaacgtgggtcgaatcagatgtaataatctcacgagtaatcgcttcgtgatcggtctcgaagatgtgttcaaaggtgtgcgaataagcaccgtgaccgatatcgtgtaacaaggctgcacagagcgcaaccagtcgttcttgatcgtcccacaggccatcacccgcaacttgagaagggtagttcaattggaattgatcacagatttgccgcgtgatttcataaacccctaatgaatgggtgaaacgagaatgttcagccccttggaaagtcgaattagtcgtgcccagttgtttaattcggcgtaggcgttggaattcaggggtgtcaattaaatctaaaatgacctgataatcgacacggatatagttgtggaccggatcacgaaatactttttcgcgaccgattttttgcgtagcataagtcaaacggtcagatcctttcattgataacgggataattgttgaaattgcttctgtaatagctgttgataatccgattggtctaatgaactgactaaatcggttgttgttttaaaatagtgtgcgttaaaacgggccagcagttgttgttggacaagtgccacggtcaaaggttgatcaagtaaatcagctaagttggccatgctgtctggctcgactgtcgggaattgccagcgctgttgttgatcagcgtttccttgttgatagaaagtttgcatcaattgtccgcgctgtttttgttggccgttaatactggcgtaaagtaaaatggcaatcccgtttttggaccgtcgctgggcaatcccggcgaatttctggccgttgatgctcaaatcgtaattaccagggcaataggaatggtctacttcgaaatgtgcaatctcaggcgcgtgtggataggtttgaaccagccaatcagctattaattcgtaagcgtcatcgattgatagctgatccgctagatgaggtaaataaagcccgatattgaggacgccagcatcggcaacgacaccaagtccaccggcatttcgaacggtatagggataacccgccgcggtcaaggaagcacaggctgattgataatcaggtaatttagtatccatcatgcccagaattacgttttgagggagcgtccaaaaatgaatgatgggttggctaagttgggtgctgaatgctaataacgcatttgtatgcgctaaggccaactgaccctgttcttggttgaaagattgatggacaacttgaaagacttgattattgggaaatagttggtttaatgcgaccattaaatcgcctccattatgattcttcctaattataacgtaaatcaagaagtctgtctttgctaggtcgaacaaatagcaacgattgatttaattgtacacgatgaatcattgacgtaacacttgttattcagttaaattgtttacaccatgaacttttttgtgatatatatttttaacaaaacgaatgatatcggttgcgatatcgttattggtatttataataaaagacaggacaagttttaattaacaacttgttttgactggaggaatagcgacatgaagattaaaaaagtactaatttcaggattattattagggttaatgcttaatttagcagggtgtggcggtagtccagggaaatcccaaaagaaatccagctcggttaaaactgaaaagaaagtcaatcaaagttctaaacaaataaaagacaaatcaaatgaagttgttgttaaagtcaaacgataattctgggaggattcataagtgaaaaagttaacgtatcgattcataacggcgatttttattgccgttcaggttttgaatgtgccattatccgtgtggagtaatcaagcacaagcgcaatctgtttcaacaacacaaactgaagcgcaacagaaacagatggccaacgaagcaattagtcaatcagaagctaagacggccagtacttctgaaagtagcgctaaaacgaaaacgagttcgtcatcggaaagtcagacgagcgcaaacagttctagtagcgaacaatcatcagtaacggctaatagtgacagtggtcaagatagtcataaacaaacccggaatcaaaaaccggaagatgtgccagatccacctaagtcggatattgttttgagtgatacgtttaatatcttacaaggttataattcttacattcatcctaccaatttgaatgaagcggtgattaccgaagatgaggagtatcaaaaggggggattgtggtatcaaaacccaatcaacttgaaaaaagatttctcaatggaaatgtacatgttcttaggcaatgatttatatggtgctgacgggattgcatttgtcatgcaaaatgattcgcgccaattaaatgcaattggcgcagtaggcgctggtcttggggcatatggtaattctgacgaacccaataattttatcaaaaatgggttggcgttagaatttgataccttttataacagtgcatccggttcaacgaacgatttagacgttagcagcgcgactaaaaatacagggcatattgcgattcaaaagacgcaaggctatgctgaaaaacatgaaaatttaattgaagcaacaactagcgatccattgatgaataatcagtggcgtaaagttaatctagaatggaattctaaaacccaaacgctggattattccatcgcgggttatggcagtaaaagctaccatattgctgatttgaacacactctttaacgggacgaacgtttattgggggttcacaggatcaactggtggtaagagtaataatcaagctgtcgcaattacgaagttacctgatcaaaccagtgttgaaactgggaaattagttaaaaatattacgaataaagacctcgattataattcagaaacaacttataaaacgggtgatatcttagaatataatgtgtcttatttttatagtagcaataatacacaagatttaattgatgccaaagttgaagacgtcttagatgcgagaacgacgtatgttccagggactttgaaatttgatggtcaaacgatgagtgacagtctgtgggataatgattacatcaaattaggtaaagttaagccgggcacatcgaaaaagattacgttccaagttaaagtggctggcagcggtgtgattgataacgtcgcgacggcagtcagtaaatacgccaacccaatgccttctaatacaactgaagtgcgaaatggtgatttagaagttactaaaattgatggggacactaaacaaccgcttaaaggtgtagtctattccctctatgatgataccggcaaagtctatcagaataatttaacgacggatagtcaaggtctattcgacttacactatttaccagccggcacttattatttgcaagaagatcaggccttacctggctatacaaaagatccaacgaaacataaaatagtgattgaaaaagatcaaaaagcacccgttaaattaaacttgaaaaattatcaacccgttaaacctaaattaacgaagtcggttaacgttaaagaaacaacattgggtagcgagtatacctatacgttaaaggttagcaatgatcaaaatacaggtatttggcacgatgtcgttgtcaaagatgctttagatagtgctaatatccaacacgttgcgaacacgacaacgttagccggtcaagcggtggctgatagtcaggcttggcaaggtgaacaattggctttaaacgtgggtgatttaaaacccggtgaaacgaaaacgattcagtttaaagtgcacgtgattgatgtaccgaaagataaaattatcaacaatgtcgcgagcgctgcgggtcaagatggtgcaggcaatgaggtaacaccaccggacgcgagcgttaaagtccccgttgattataaaactggtgaattagtgtcaacgaagtcggtttctgatcaagccggcaacaatatcaatgggcacacggtcaaagtgggcgatatcattcattttgacatcaaggttgctaataaagtgacggacagtattgtgactgatattttagtcaaggataccttagttaaaggttttagctaccaagctggttcattgacggtggatggtcaagcggctagtgatagtaattttaacggtcaaaatttagccatcaatattggcgatttaaaaggcaaccaagaaaaaacggttgggtttgacgtcaagattacggctgaagcggatggcagtatgaagaacgtggcgacttcgactgggaagacacccggaaccgacgtaccaacgacttcgacgactccgaatacggataatgaagcgaatcctgaaccaactttaaccaaagaagcatcggttaaagatgtggaattaggcggcacttatacgtatactttgacgcttaaaaatgatgaccatgctggtatttggcataacgcgatcttaaaggatagtttaccagagcaaatttcattagttgctgcgacaaccacgattgatggtcaaagtgtgagcgatagtcaagtctggtccggcgacaacttatatgcgcggctaggcgatatggccgccggggcaacacacaccatcacgcttgaagttaaggtcgataagcttgatgaaacaagtcaacaagccattccaattaaaaatatagcgacagccactggtgaagatgcagtcggtaaaattgtgaaaccgcaagatgcccaaattattgtcctcgctaaatacgacaatggtcaattattctcttacaagaccgttgctgatcaagccggcaataacattaacggcaaagtcgtcaaaattggtgatatcttacattatgaaattaatgttactaactatttcccaacgagtatcgtccgggctgtgcacgtcacggatgcattaccggctggactagactatcaagcgggtacgttgaaagtgactcgcacaaacgatggcgatattaccaaccagacaacgggtgggtttaccaataacaagttagacgttaacgtcggtgatattgcgaataaaacgaccgattggattacggttaaggtggcatttgatgtcaaagtgactgatgaagctaacggtaaaattgaaaatattgcaacaacaacgggtgaggggccaggcacttcaacgaccacgccaccaacttcgaatcaaaccgttgctgaaccaacattaactaaaaccgttgatactaaaatggcaactttaggtgatgaatatacgtataccttaacggttgcgaacgctaaaggcgcagcaacttggttaaacgctgaaatgaatgatttattaccagggcaagttgagttggtagcaggttcgaccaaaaaggacggggtcacgattggtgatgccactgtttggagcaacagtaatcgtaagttccatttagctttgggggatttaaagagtaatcagaaagtgactgtgactttcaaggttaaggtcatcgcgattccgggctcgcatattataaccaatacggcgaccgccaatggtcaagatagtaatggcgatgaacttaatccggatgatgcgactgcgattgtaccagttgattataaaaccggtgcgttgaagtcacttaagacggtcacggatatgcaaggtaacaatatcaatggtcaagaagttaaagtgggcgataagttacatttcgatattaaggtgactaacccgattaaagatagtatcgtgacgaatgttttagtcaaagatttacttgaagaaggctttacctttgtgaatgggtcgttaacccaaaccacgaataatcaagtcaaaccattagctgatagcaacgttgctggtcaacaattgacagtcgacgctgggacattaaagggcgatgaaacgacaactattggttttgatgtgacggtgaatgaaaatgcaagcgcggggatgaagaacgttgcgattgtcgatggcacgacgccagggataccgaccgacccaacgacaacgccaccaactatcaatggcgcccaacccaatccaacgctagaaaaaacggcgagcgttaaaaagacgtacctcggcgatacttttgaatacacaatcaaggttaagaatgcggcggatgcggctaaatggatgaaggcgcaagttaatgatcaattagcacaatcactagattatgtggctaattcaacgcaaattgatggtcaggcagttaaagatcaaggtatttggtcggctgatcagttacacgttgaatgggctgctttgaaatcaggtgagagtcatacgattacgttcaaagttaaagtcgtttcggtaccggacaatgcttatctattgaatgtcgcccaagcaacggggacggatgatcaaggtaaagtggtggcaccgaaagatgctgaagttttagtacccgttcaacatcatgacggccaattaacgttgaaaaaggcggttcaagatgaacaccaaactgacattgatgggcaacaagtccaagtcggtcaaaaattacattacgttttaacggttaaaaatccacaagcggatagtttaatcagtaacgtcattttacgtgatcaattaacggcgggattaacctatcaaaaaggttctttaaaggtgaatcaaaaagcgcaaagcgataacagttttaccggacaagatttggcgattaatttaggtcaattaaccacgaacgaaacggttaaagttgaattcgatgttgtcgtgaatgaattagccgatgatcgtctccctaatcaagcgacggtcgaaggccaacaaccttcagggcaggacaagacggtcacgtctaatcaaacgatgaatacaacccaaccagcgccaacattagttaaaacggcgagtgtcaatcatgctgaattgggtcagacattcacttatacgttagatgttaaaaatcaagcaaccggcagtatttggcacaatgcgagtgttcaggatacattggatacgcaaaatctagcattagttccaaatagtacgaagctggatggtcaagttcaagctgatgcaaccgtttggcaaaatgaaatgttggatgttcaactgggcgatatgaacccgggtgtcagccatacgatcactttccaagtaacggttaaacaaattccaaacaacaaattagtgcttaatcaagcgactgcgactggtgaagatagtaataatcaaacggtcaatccgccaatggcgagtgtgactgtcccagttgactacaaggcaggtcgtctagaagcgactaagcaagtcagtgatgcacaaggcaatgatttagaaggtaaagttgttaaggttggggataagttacattacaccatccaaacgactaatccggttgctgatagtattgtgactaacgtgttgattcaagataaattagtggctgggttgacctatgtgccaggcagcttaacgcaacaaattgatcaacaacaaccaacggccttagctgatagccacgttaatggccaacagattaaggttaatgcgggtcaattgaacggacaataaagtgtcacgattagttttgatgtgacggttaacgatcaagcaagcaccgcattgaaaaatgttgcaacggttggtgggaacacgcctggcgatccagacgggccatcgactgaagtgacaaccgataatcacgcgcaaccacaaccaagtattacgaaagaagctaacgtggttaaaacgcaggttggtgaccaattcaaatacacattgacggttaataatgctacgggtgcgggtcaatggtttgaagcacaagtcaaagacacgttaccaagtgaagtggcttatgtgccaaactcaactgaaattgatggtcaaagtcaaacggatcgtcaaatttggcaaggcaatcaattagcggttaatctcggtgatttgaagggtggtcaaacccataccattacgttcatggttaagacaactaaggttgcaactagcggtaatattattaatattgctaaattaaatgggcaagatgatactgggtatcaaacgagttatcaagatcgagcagatgtttttgttgaagcaataccaagtgttccggtgacaccaagtacaccggataccacacaacctggcaatcagaatacaaacaattctaaagtcggtggtcttttaccacaaactggggttgctaaagctggtttagcagtcgcgattgggttaattttaatcgcgggtgtgctagggtatcaagtgcttcaacggcggaaacgtcaatagtgattaaattgaaactgtaatataacgcggttatcaatttagaaaatgggctatccgaaatttaaggatagcccatttttggatttgtcggtggtgactttgacttgaatcgcttataataggaaacaagcaatcttttagaggagtttattgaagatgacagaaaaaagtagtctaccaattaaggttcatttagaaacccagattacccaagagggacaagttgaatcgcacagttttgatgaagacggtcaactcgttaaaatgggcgatagcttatacattcgttatattgaacacgttgatcaacaagcgatagccgtgcgctttaaaattgatgcaacgggtcgcgtccaattaacgcgcggggcgagtaaagacgagacgcaactactgctttattttaaagaagcagaacagatggcgtcggtctatcaaacccaatatggcaagttgccagtcgtcacgacaaccaatcagttagtttggacgattaaggatcaaccactaagcggtgaactggtggtgcaatatcaattagaaatcagccaacaggtggttggcgattataaattacgattgatttttaccgcataagctagtatgattaaggatagactgttgaaaggacgtgtaccggttgaaattaaacgtttttaaaggccaaaataaagaagaactatcaatgatcgaagtcgcacatgcaatcctagaagaaaaaggcgacacaatcggatttgctgatttagcgaatgaagttcaaaaatatttaggtaaaagtgatgaagaagtgcgtgcacgcttatcacaattttatacagatttaaacgaagatggtagtttcatttctttaggtgaaaacgtttggggccttcgttcatggtacccatatgaatctgttgatgaagaagttaaccatccagaagatgaagatgatcaaccaactaataagaaaaaacgtcgtaaaaaggttaatgccttcttggcagacgtcactgatgatgacgatgtcattgattatagtgatgacgatccagaagacgacgatttagaggcatctgatgatactgaattagcggatgatgaatcaggtgaaaacttgaaagaatatcaagctgatttacaaaatatcggggatgacgacgatgatgaagaagttgacgcattagaagacggcatcgaaggccaattatctgaatttagcgatgacgatgatgacgaagaagatgacgacgaagacgatctttaatctgaaattggtgtaattttcacttgacgataaaagacctttcttgtatcatattctttgggcgcttcgcactttgtgtgaagccagaatcggttaacaagctcccctattcatttttgaatggggagcttgtttttattttttgttgtttcccaagtatttagaattagcgtaggctaataagaaaaggagaatatttatatgaccaaatatgtttttgtcacaggtggcgttgtttcttcgctcggtaaagggattgttgcggcttcacttggtcgtttgttaaagaatcggggtttgaaggtcacgattcaaaaatttgatccatacatcaacgtggatcccggtacaatgagtccttatcaacatggggaagtttttgtaacagatgatggtactgaaacagatttagaccttggccattacgaacgttttatcgacaacaacttaaataaatattcaaacgtgacgacgggtaaaatttattcagaagttttacacaaagaacgtaaaggcgaatacttgggtgcaactgttcaagtcattccacacatcacaaacatgattaaagaaaaaatcatgcgcgcagcgacgaccactgattcagatatcgtgattactgaaattggtgggacggttggtgatatcgaatcactcccattcttagaagcacttcgtcaaatgaaggcggatgttggcgctgaaaattgtatctatattcatacgacactagtcccttacttaaaggccgctggtgaaatgaagactaaaccaacgcaacatagtgttaaagaattacggagtatcggcattcaaccgaacgttttagtttgccggactgaaaaagaaattccagatagtatgcgtaataaaattgcccaattctgtgatgttgaaccagaagcagtcgttgaatcacgcgatgcggaatcaatttacgatattccattattattacaaaaacagggcttagatgattttgtcttgaaccatttcaagatgacggcaccggctgctgacatgactgaatgggctgatatgctccataccattaagaatcttgaaggcacgaagaagattgcgttggttggtaagtatatcgaattgcaagatgcttatatctcagtgaatgaagccttgcgttctgctggttacgtctataatacggacgttaaagtcacacctgttcaatcagaagacatcactaaagaaaacgttgctgaaaaattagctggttttgatggtgtgattgtccctggtggtttcggtgatcgcggccttgaaggcatgattgtatccattcaatatgcccgtgaaaataacgtgccattccttggtatctgtttagggatgcaaatggctagcattgaattcgcccggaacgttgctggaattaccgatgcaacgactggtgaagtgcatccagatgcaaaacataaattaatcgatatcatgtctgatcaaattgatgttgaaaatatgggcggtacgcaacgtcttggtttgtatccatgtaaattaaaaccaggtacgaagacggctgacgcctatgataaccaaagtgtgattcaacaacgtcatcgtcatcgttatgaatttaataatgaataccgtgatttgttaacggataaaggtttagtttttgctgggacatcaccagacaatcgtttagtcgaagtcattgaaattccagaaaataaattcttcgtggcagcgcaataccatccagaattcttatcaagaccaaacaaaccagaaggcctattcaaggcattcataggagcaacaatttaagagtgctagctcagctgtttagcttctgagtatagcctaaaataaaagcgggtggcctgaattttggtcacccgcttttatttgtagctagacggaagaagttagctgagatagcacgttttagaagagagtgctgacttaagtagttaatcttcgagcataacctaaaaatgtcaattatggttgaacttaaccatgattggcattttgtagttaggcggagaagattgcttgaggagcacgttttagaagagagtgctgactcaagttggttaggctttgaggattaacctaaaaacaggaattatgagtggtctcttgctcatgattcctgttttgtagttaaccggaaaaggctacttgagaagcacgttttagatcagagtgctggaactcacgtgtaatttctgagcattagcctaaaataataacgccggatgacgatttttaatcatccggcgttgttttttagattagagtccttttggattagcggaaaattgttcttttaggcttattttctaaccaaattattagttggccttttgtttaatgatttataccgaatgttttcagtaaaagtgcgggattatcttgtaatttactgattaattaattattattatacatgtgtgactatttcagaataaaaaacaatttttgaaagtgcacactgttaactaactattaaaataaatttggaaaaagtcaaaagcccgcttgtcgattgcccaattattagacagtcattaaagctagctcttttgttatgaattgaacggggaaattaaaaaatgaaaaaaatgttaattcaaggcggtaatcttttatccggagaagtgacaatcggtggtgctaaaaatagtaccgttgccattattcctgctgctattctggcagaatcaaaagttgtgttagacagtgttccccacattaaagatgtgaacagtttactatcaattttagatgatatgcacgtgacatcgacgtttgtcggtgatacggtcgaaatcgatccaacggcgattatttcaacgccattaccaagtggtaaaattcaaagtttacgggcatcatactactttatgggcgctttattagggcgttttggtaaagcagtggttggtttacccggtggggatgatattggcccacgaccaattgatcaacatattaaaggctttgaagcgttgggagcagttgtgtcgaataatcatggtgcgattgaaattaacgcaccagagggcttgcatggggctaaaatctatcttgatatggcatcggttggtgcgacaatcaatttgttgttggctgcagtccgagctgaaggtcaaacgatcattgaaaatgcggcgcgtgaacctgaaattgtggacattgcaaccttcctgaataatatgggtgctaaagtccgtggcgcaggaaccgatacgattcgaatcgaaggggtcgcgcacctctatggtcatacgacgcacacgattattccggatcggattgaggcggggacttacttaagcatggccgcagcgattggtgatggcgtcaacgttaagaacatcatcagcgaacacatggatgcctatttagcaaagttggaagaaatcggcgttaaaatggatgttaaagaagatagtatctttgtttacccatcatccaatttaaaaatggtccaagttaaaacgatgccgtatcccggctttgcgactgatttacaacaacctttaacgccgcttttattaaaagcacagggggaaggcattgttgtggataccttgtatccgaaacggacgcgccatattccagaattaattcggatgggggccgacatttcaatcgaaaatgatgtgattatgttgcaccatgctgatcaattacaaggtgctgaagtctctgccgatgaaattcgcgggggtgcttgtctgatgattgccggcttaatggccagtggtgtcacgacaattaccaatgctagcaatattttacggggttacgatcgggtgattgagaaattgaccggtcttggagcggttgttaaaatgattgaagaataacggattggcctattgttttttaggcgaattcatgctaatatttaatggttatgtaaacaaatatctctgacatagcaaatatctcagggcaaaacttaagttaagcatcttcggatgtgactaactttagctaaaaggagcggaaaagacatgaaacaaggtattcatccagattatcacaaagttgtatttatggattcatctactggtttcaaattcatctcaggttcaactgcaaactcagctgaaactgttgaatgggaagacggtaacacatatccattaatccgtgttgaaatttcatcagattcacatccattctacactggtaaacaaaagtttactcaagcagatggccgtgtcgatcgtttcaacaaaaaatatggttttgcagacaagaacgctgccaaataattattttagaatcagggatcaattccctggttttttttgtccattttttaaggaggaatatgatgaaaatcggtcgactacaggcttttagtgacggtgttttttcaattttattgacgttattagtcttagattttaaggtgccaagttatcaaagcggtcgtttaacccaggcggttttaaaccaatggccgacactggttgcttatggattatcatttttttacgtggggaccttatggttgtttcatcacgattattttgcgaaaataaaggaaaccaactggcaattgaacgtcttaaatttggtgattctatttacagtcacgttgattaattatccaacgagtttgctagctgaatcgattgcgcaccaacaacacaacgatatgcaatttgctttttcgtattatgcgttagtggcgttattgatatccgcgatgttttggttactctaccgtttcatggcgcaacatcgtgaattgaccggttaccatcagaatcatgaacgattctaccaacgaaccaagaacgatccactaaaaagtgttacgatttacttagtggcattgatcgggattcaaatcaatctttggttaggagcagttttgatgattgcggggaacgtttttcattttattgcgtatttgcgattaagccaaggaattgagcagtacggattgattaagaagggatgatgcaagatggtcaaacaaaaaagaacgttaagatgggttgattgggtctatttattcacgatgggtagtcaactcatttatattattttttacttagaacaattgattaatcggccgactgaaaatgctggtttagcctttgcgattttacaagtggtcgccggtttaatcattgcgacattaccgattttgattgaacgttttatgccgtatcggttcccagaaattttatacgccgtttatctagcctttgtctactgttcaattctgttggggaccggacttcatttctatagtcggttcatctattgggataagtttctgcacgttttaagtgccggactactagccggactgggttatacgatttttaatatcttgatttctaaacaacaacgtcaaacgatgtcggctttattgatgagcctcttttcattaacatttgggagtacggttggtattttgtgggaattctatgagtttacgggggaccacttcttaggactcaacatgcaacgtttcatggtcgggggcaaactattacagggccaagcagccttagtcgataccatgggcgatttattagccgacgtcctcggctcgttactgatttctgtcatcggttattactgtattaaatataaccgcgattggttagataagttgagattcacaaaaaaataagtgctgattgagttggtcaggctttgaggattaacctaaggatttaaattatggttggttttaaccataaattgaatcctgtcgttaaccggaaaaggctactcaagaagcacgttaaaaaaatacggaccgaaaggtttgacctttttttgtagattagattagaatcgtagccatctatcatggaaaggggtgctaattatgactcaagtaatcacgcaacaaaatattaatcacttcgtacaagaacaaccattagtgatcttagacttctgggcggattggtgcagtccttgtaagattatgacgccgatactcacagagttgcatacagagttagcggaaccgtttaaattaggcttggtcgatgttgaaaaagaaccggcgctagctgaagaatacggcattcaatccgttccaacgttgttaattttcaaaaatggtaaggcgacggaaaaagtcactggggcttttccgaaggctaaactaaaaaacttcctattaaaaaaaatcgcagaagttgattaaattcaaccctgcgatttttttagtggttcgataattgacgaacacgatgatagaggactaaggcggcaacttcacaaccaaagattagaatggcaagtggtgcgtacgtgtgactgccgagaatgccgaccaatggggataggaaaatcccgaagacatacatacccagtcctaaaaccgaagaagcaattccggcgtgttgcccttgtcgttgtaatgctagtgaggtcacaaccgcgttgattagaccaagcgttgagacgactaggaacaaaccgattaaagctaaccaaagcttatcaggaccaatttggcttaataggacaaacacgctaccaagtaacccgccgagtaacccgaatttcagttgttgtaattcggtaaaacgttggattaagatggctgatagttcggccattaggataataccagcaccgttgacggcatagatgatactaaaactggcttttgaaaggctaaagacgttttgtaacataaaactagaacctgaaatataacagaacattgcaccgtaaaccaaaccttgaattaatacgaaatagatgaaggtgtgatccttgaaaattgttttaacgttagttttaaaactgatatcagcttgtgcttcagcagaaacaacgtgggtttccttaaaaccaaaaattaatccaagtagtagtaaagcaccgacgacgctgataaaaccaaaaatgccacgccacgacatataattaagcaaggcactcccaattaatggcgagatgattgggaaaataccgttgatggccatcagtaacgcgataaacttagtgagttgacgaccactgaataaatctttcgcaactgcccgagtcacaacttgaccggctgagctcgcgatgccttgaatgaaacggagcaagaagaatatccagatgttgtgggtcagtagcgataatagacacgcgactaaggctaaggtcatgccaatcaataagggttgccggcgaccaacacgatcgctccaggcaccgataaaaatcggaccgacggctaaaccggctagacacatggtcagactaagctggaccattgaagccgatgtccgaaaatcagactgtagggtggggaaagccggtaaatacatatcgactaatagtggtccaaaggcgcttagggaaccgagtagaatggatagccagatggttttggcttttgaaaattgcatgtgtaacctcctcaataaactggaaaaagtgcaaaaaaatagcccgttaatcacgtagctgtcgcagtacgtattcgaatgagtgctataaatgttgcttcttaattacattatcataaacgagggatagacgcaaaactttctgttattttatctgagaaaagatggtttccatttcagcttaaacaagttatgataaagatattgaaaaaagaattttttgagagaggttttttaatgaaaatcgcacaaaaaaataaaattctagaaacctgtttaacggcggggcgcatcatgattgagagtggctcggaaatgtatcgggtggaagatacgatgaaccggattgcgtataatgctggcatccaaaaaagcgtggtctttacgacgccaaccgggttatttatcggcattgaaaaccagccgtacgttcagttaggaccggtttcggtgcgcacgattaatttagaaaaagttgaaaatgtgaatacggcctctcgcctgtttgcgacaaaggagatcacgctggatcaattatcaatacgcttaaaaaagattgatcagcatacgccttattttccaatttggatgcaaattttagcggcagcggctgtttcagcctttttaatgattgttttttctggcgaatacgattggttggattttatcccagctgcgatcgtcggggcaatcggctatgccgtcttctctgaagtcaatcggttgactagtatccggtttatcggtgaatttctagggtcgtttagcatcggcatcacggcctacttattaacaaagtatcatttgggtgttgatttagataacatcattatcggcgctgttatgccgttagtaccaggtgtggcgattaccaattcaattcgggatatgttagcgggccatttattatcagggatggtccgtggcatggaagctttgttgagtgcttttgcaattgggaccggtatcgcgttgatttttagatttgtcatttagaaaaactcggaggtttaaatatgccatattggttgcaatttatcgtgcaggcggcgtttagttacgcgtcaaccgtctcttttggaatctgtattaatttaccccgccgggcgcttgcttggtgtgggattgccggcatggtcggttggcaagtctattgggtgttatttaatttaggtagtggccgtatgttgggcaatctgttaggcgcgatggcggtcggtatttgtgggagcatcttagcacggtataaaaaaatgccagtcatcatttataatattccgggattggtgccattagtccctggaggcacggcttatcgcgcaattcgtaatctggtcttgggtaattatgaacaggctgtttcgttaagtgtcacggttgtcatggtggcgggtgcgattgcagttgggtttatgttggcgcaaattttagccgatttaacccggaaacgtgcgattgcgccaaaatggataacaaggcattgaagttctcggaagcgtgtggtatactcaatacatgcgatgagtcgagtaagtctcggtaggcaactattctgcgaaagcagctaggagacccaaagatacaggacaccacgattatttatttaatcaattgccgtatgcaaggtgttttcgcccgctgtgttgtggagcacaaggtgtttattcttcggaatactgtcgaaaaagatctttccgtcaggaaaggtctttttttgtgtcctaaaatgagacatatttgatattataagagtagatgaagggcggttatgcgaatgtttgattttgaaaaggtacaacgtttaaatgggttagagttaacgattttgaattacgttttggctcaccgggaattggttgaaaagatgacgattcgaaaattagcaacggaagcgcacgtttcaacatcaacgattctgcggttctgtgaaaaattagacttcgaaggtttttctgaatttaaatacgcactgaagcgcgaacgacaggcgactgaacaggtcgtgacgtctgattacgatgttttgattccggtcactgattttttgaagaagacgaataatgatagttttcggcaattgctcagccaagcaactgagatgattgttaacgcgaatgcggtctttttctttggcattgggacgagtggcgctctagcgcagtatggctcgcgctatttagcgaatgctggcgttttctcgttgagcattgccgatccgtttatgccgttcgggatgcacgaagttgtcattcatgaagcgttactgattgtcttgtcggtttcaggtgagacgacggaaacgattagccaagttcaacagttcaagatgggcaaagggcgcgttctagcgattacgaatcaagctaattcaacgttagccagcttggccgatttagtgattccgtattatatgccggaagaaaagaacggctcattgaacaatacgacacaaattccggttgtttttattctagaattattagcacatcgagtggcagcgcttactaaagcgcagattacgggtcgatgaaacatgtgccatttatgggacaaattattttagcacacgcatttctttattccgcccgaatgactagtcaaagtaagtcgtggcgctatatactatttattggaagcgcattcctactatagtagttagtacacgcacttattaatggttattcgaaaggaagaatcgtatgaacacatggattaataccaaattaatgccaccgattatgaaattcgtcgggactagagctattaccgcattgaaaaatgggatgttgtacgtcatgccatttacgattgtcggttcaattttcttaattttagccaacctcccagttcaaagctgggctgattggatgacaaaaacaggcttaaccacttattggaacgtggcctacaacgcatcatttgccatcatggcgttgattgccgttgccgggattgcttattcctgggttcaagatgctggctttgatccgttcccagcagggttattatcaatcgtttgtttcttattagtgacacgccctagtaccgcgattaccgcagcttctgggaagattatcatctctgcgaaaatgatgggtcaacaaaccggttttatcgatcggacttggcttggcggtcaagggatgatcacggcgattatcgttgggttattggttggttggatctattcagccttcttaaaacgcgacattcggattaagttacctgaacaagtgccagccaacgttgcgggttcatttaccgcattgattccggccgctgttttgattagtggttcattagtcgtctatatcttatttgataaactagccaactcaaccttaaccgaatcaatttacaacgtgattcaatcaccacttcaagggattactgattccttcggcgggatgttagccatttcattcttagtgccattcttatggttcttcggggtgcatggttcaaccatcgtcggcgggattatgggaccattgttgcaagctaattctttagccaaccaaaagattttggattctggtcgggctttgacactcgctaatggtggccacattgtcacgcaacaattattagatcaatttatgacggtcacaggcgctgggatgacaattgggattgtcgtttacatgaccttctttgcgaaatcagctcaatttaaagatttaggtaaattatcattagcaccagccattttcaatattaatgaacctattttattcgcaacaccaatcgtcatgaacccaatcatgatggtgccgttcttcttaacaccaatgttgtccgctgttttaacgtggaccgcattacgaattgggataattccactcttcccagggacattagtaccttggacaacgccacctatcatttctggattattagtcggtggctggaagacagcgctttggcaagcattgatgttagtgatgaccttctttgtttacctaccattcattcggaaacaagatcatttaaattttgaaacggaacaaacaaccaaatagattaatcgtttaggcagaaggagagcagattatgggacaattgcgaaaagatttcttatggggtggcgcggttgccgctcatcaactagaaggtgcatggcaagcagatggtaaaggggtcagtgtatccgatgtgatgaccgctggggatgttgatcatcaacggggaatcacggatggcgtattaccgggttataactatcctaatcatgaaggcattgatttttatcatcgttatgcagcggatattaaactatttgccgaaatgggcttcaagagtttcagaacgtcgattgcgtggactcggattttcccaaacggggatgaaacggaaccgaatgaagcggggctacagttttatgatgatttatttgatgaatgtctcaaatacgacattcaaccagtcgtcacgttatcccatttcgagatgccttaccacttagtcaccgaatatggcggctggcgtaatcgtcaggtgatcggcttcttcacacattttgccgaaacggtctttaaacggtaccaacataaggttaagtattggatgaccttcaatgaaattaacaaccaagctaattatcatagtcaattttcattattcacgaattcagggttaaaaatcacggccgatgaaaatcctgaaaaagtgatgtatcaagctgcgcattatgaactcgtcgcgagcgctcaagcggttaaaatcggcaagcaaattaatcccgattttgaaattggttgtatgattgcgatgtgtccaatctatccactgacggctaaaccagaagatgttttgaaggctgaacgtaccatgcaaacccgttattggtttgccgacgtgcattgtcacggccggtatccagaatggttattacaatatcagaccaatcaaaattacaatttagatattactgatgctgatttagccgatttagcggccgggaccgtcgattatatcgggtttagttattacatgtcctttgcgactaaggataacggtgcggccgaattacactatgatgaagaacacgatttagtgcctaatccgtacgtcgaagcctctgaatggggttggcaaattgatccggttggcttgcggtatgcgatgaactggttcaatgatcattatcatttacctgaatttattgtcgaaaatggttttggtgcggttgatcaagtcgaagctgacggcagtattcatgattcataccgagttgattatttgcgcaaacaccttgtgcagatgaaaaaagcggtgattgaagacggcgtcgatttaatgggctacacgccttggggctgtattgatcttgtttcagctggtacgggtcaaatgtcgaaacgctacggcttcatctacgttgataaacaagatgacgggtcggggacgttggcccgttcgaagaaggattccttctattggtaccaaaaagtaattaaaaccaatggtcaagatttaacggattaatgataaaaatggttgctgaactgttcgatgattaatcgagcaagcaaccctgaaaagcgcttattcagaacttttggataggtgctttttagttgtggaaaataaaacttgcattatcaagtgaaagcggttaaattataattaacgagggtcactaattagtgattggttgagcaattgggttaaatacggctattttctgaaagtaggctaacaattttgtcacttattgacatctttgaccgttatgggatgcaaaataattaattttcgtttacaataagtaagtacataaatgggaatggggttaagaaatgaatattgcatatgtggtgattaacattgtcattatgttaatcatgttgtttgttttaaataagatggcgcgcgtgcacgttaaatttagtaaacgggtattcgttgcgttaggcgtcgggattttattcggggccctcttacagttagtctttaaatctgattcggcggttgtcacacagacggccgattggattggcattgtcggtaatggttacgtgtcattcttgaagatgatcgtcatgccattagtcatggtgtcaattatccaagcgattacgaatttagattcgtcaaaaggtttgggtaaaatggccggtttagtgattggtattttagtattcacaacgctgattgccgcgacggtgggggcattaacgtctaatgtcttcgatctaaacgcaagctccattcaatcgggccaggttgaaaaagcccgttcgaaagaattggaagccaaattaggggatgtccaagaccaaaccgtccctgaaaagattgtcagctttattcctgaaaatccctttgcggatatgacgggttcacggccaacatcaacgttagccgttgtgattttctcagcatttctaggaatcgcggccctgcaattacggcgcaagaaaccagaacaagctgacatgtttaataagattgtcaacgccatatacgccgtgattatgcgcatggttacgttgattttacggatgacaccttatggggttttggcgttaatgacgacgacggtcgcacaaaccaacgttcaagggatattaaatctcgggaagtttgtgattgcctcctacgttgcgttaatcattatgtttattgtccatttcttattgattatgttgacgggattgaatcctgttagctatttcaaaaaggtcttaccaacgttagtcttcgcgtttacgtctagaacgagtgcgggctcgattccaatgaacatcgaaactcaaacgaaacgtttaggggttgaagaagggattgccaacttatccgcttcgtttggcgcttcaatcggtcaaaacggctgtgcgggtgtttatccagcgatgttggcagtgatgattgcaccaaccgttgggattaatccatggagtgtggctttcttggttaaattaatcttgatcgttgcaatcagttcattcggcgttgccggtgtcggtggcggggcaacttttgccgcgttaatcgtgttatcatcgatgaatttaccagtcggtttagcgggcttgttaatttcaatcgaacccttaatcgatatgggtcggacagcgttaaacgtagatggttcaatgacagcgggggtcttatcagcccatttcttaggtaaattagataaagataagtttaatgatatgactttaaccgatgaatcagatgatttagcttaattaattaaaatggaggtctttaagatgcggacgattattattggcgcaacggcggcgggaacgagtgctgcggctaaagcgaaacgaacgaatccagatttagaaattacgatgtatgaaaaacgggattacgtttcctttggggcgtgcgggttaccttattatgtcggtgcgtattttgaagatgctaaccaaatgattgcacggacaccggcggcttttgccaaacaagggattgatgtgcaacttgaacatgaagtgacggccgttgatttcgacgcccaaacagtgacggttttgaactttaccacccaacaagtggcaactgaacattatgatcaattaatgttagcaacgggagcgacggcaatcatgccaccgtttaagaatgctaatttaaaaggcattcatcatctgcggactttagcggacggtgaaacgctacggacactgggccaatctgaagctgtccaaaaggtgaccgtgatcggagccggttttatcggtctcgaaattgcggaagaatttcaccgacttggcaagcaagtgcaattaattcaattagaagaccggattttaccattggcttttgatgctgagttaaccgacatcatggcacaagatttagttgataacgggattgatttgcatctagctgaagcggttcaagggtttgccggcgatacgcaagtagcaacggtcatcacggataagggccaatacgccaccgatttagtgattgtggcgactggaattcggccgaacacgcaattcgtcgatgatgaccggttgaaacgcttagccaacggcgcaatcatcgtcgatcaatcagggcatacctcaatcgatcacgtttatgcggcgggtgataatgcgacggtcatcaatagcgtaacgggacaaccgatgtattcaccactggcgactggcgcgaataagttaggccggattgtcgggactaacttaggtggtcagagtgcgcaattgccaggcatgttaaattcggcgggtgttcaattggtgaccttggaagcgggtcgaacaggtttgactgaagcggaagctaagacggccgggattgattacaagagtgttgtgattcatgataaaaatcaaaccgattattatccagggcaagcagcgattactgttaaattaatttatcgcaaagagaatcacgttttaattggtggtcaagtgattggggctaaaggagcagtcttgcgggtcgacgttttagcaacggcgattcaagctcaaatgaccacggaacaactagggttattagacctcgtctatgcgccaccgtttgctcggacgtgggatgcattaaacgttgccgggaatgtggctcattaatcagtctaaaataacatcagttacctgaattttggtaattgatgttattttttttatgaacaattcactaaacaatggtgattaaccgtattttatgagtatttaatgttatttcgggtcggatattggttaacttcatagtgtttacttgattaatcaagcggatttgtgctaaacttccagttagatattaattttttctaaaaataattatgaaaccttaatagtatttaagatttatcaaataaattgactgataggagaaaagttaatgaataacacgaagcgattagttgcatttagttctgggattttaggggccacagggatcggcttgttaagcgcagggcaagctcaagctgcaacgacagcaaccgttaattatactgatggcgcaaccactgtttggacaagtcccacaactggtcaaaccgctaaacgttacattttcaagggccaatcagttaatctattggcttcacaaaagattggtgctgaaacttggtaccggattggaaacggcgaatgggtaccagaacgttatctaacgacgactgataaaccagcagttgctgaaactgaaacggcacaacaaacagtccgggttgcttatgcagatggggcaacgaccgtttgggcaacacctacttatacagcgccaactggccgttatttaacttatggtcaaacggaaggtgtgacaaagacccaaaccgtcaacggtgaaacttggtatcaactcgctaatggcggctggatgccagcacgttttactggcgaaggtcaattaaagacaacaccaactgttcaacaaacaccagttgcaacgacgccagcacctgctgcaacgcaacctgctgtcgctgaatcaacagcaccagttgttagtgaaccagcacccgttacctcagaaagcacatcttcagctgttgaaacatcagaatcagtagcacctgttgaaagcacaccggttcaagaatcaacaacaccggctgttgaaacaccaagcgaatcagctgcaacttcaagcacacccgttgttgaagaacctcaacaagagagtgttgcctcaagtacatcaaccactcaaacaactaataacacgcaagaaacaacaaatacgaatacaaataataatcaacaaacaacaatgccaagtacaccggcacccgcaacaccagcaccaagtacgccagcgccaacagcgccagcaacaactggtaatgcacagtcagtgattaacttagcaatggctcaaattggcaaaccttatgtttggggcgctaaaggtcctagcagttttgattgttctggtctaatgaattacgtcttcaaacaagctgctggtcgcgatatcggtggctggacactccctcaagaaagcgctggttactcagtttcattgagtagcttacaacccggcgatttattattctggggtgcccaaggcggttcataccacgttgccttatacattggtggtggccaatacatccacgcaccacaacctggtgaaaacgttaaaattggttcaatgcaatattatgcgcctgattttgctaaacgggtcttctaaagagcgttatcaagaaaacatcttactttcgggtgagatgttttttgtgttttgggactaaataagctatgatgtgaaagagatttaaaaaaaggactgataacagatgaaaattgaagtacaagcgtttatcaatcaaattcaagatcaaacctatctaacggatgaatatgaattagcgacgccagaaccattcaccagcgcccccttgctggctgcaatccaaccagcaatcgaaaaggctttagagaaacaaacactcgcctctttttcagcaacgacaacgtatcatgacgaacccgttaaagtgacgctagaaacggggattgttaatttaccgttgcaatacattaaaaaagtgaaccaattttttgacgaagcagccatcgttgacgttaagctctatctatacgtgacgtctccttggattaaccgttcagggatgcggattgacgagattggcaccatcgaaactgttgcggcagattctccagcggcttgggctaaaatctcagaattattagatcaagatttattagctgtcgtggcgggttcagaagcacctaaagtggttcctgaagagcaaccggctaaaaaggcgcccgctaagaaaaaagcaacgactaagaaaaaagcaaccgcaaaaaagaaggcaccggctaaaaaagcaaccgctaaaaagaccacaaccaaaaaagcaacgactaaaaaagccgccgctaagaaaacaacgacgaaaaaggcagccactaagaaaccggcagctaccaaaaagactactaaaaaagctgactaatttagtcagcttttttgattgcttcggtgaatggtaatggcccattaacgaaagaatatttatggtggttggtttcaacagggttttctaagaccgtttgaatcattgtggcgacatctgcgcgggtgacactgccactagtgggttgcatggtcactagcccagtgccaacagcgttgcttaacgtgcctggtcgcagaatggtccaatctagtccagaatattctaaccaatgatcggcgtaatatttagcggcatagtagggtttaatgctttctggccatttagcgcggtcttcaacaaataaggcacttaccatgacgtaacgtggtacttcggcaatttttgcggcggccatacttttgacggcaccatctaaatcaatcagcaaggtttgatcatcaccagtgcgaccaccggagccggccgtaaagacaatggcatcgtgtttattgaataacggggccaattctttcggttgttgggttaaatccaattgaacggggtccgcacccaatgctgctaattcaggcgcttgagtggccttacgaatgccggccgagacttgatgaccactggcgattaaacgggcaatcagtaattgaccgacttggccatgagcaccaatcacgaaaattttcatatgattcctcctacaggattaaattaacaccattatataggttatttaaagtaagtgcaaagtaaaaccctttagaatagctgttatagcacaaaatattcagaattatttatgagaaaaaagtaagtatcgattgacatataaataggattataacacagttgtaagcccttttatttttatgatttggataacattaaaaaaatctcataatggcagataattgtttagtgtaatataatgaagacagtcctaaattgtgttatggtacagatatagggattgtgatgtattttacaattcgtttgacagataaatctgttatttaatcataatagagaatgaggtgctcaggatgacaaatcaatatcgaagtgtttttgacatcattggtcccatcatgattggaccatctagttcacatactgcaggggcagtcgccattggacatgtggcgaatcgactattccacgcaccagtcgaaaaaattacggttcgttattttgaatcgttcgcccaaacccatcaaggacacgggaccgactacgccattatcagtggcgttttaggatttgaccccgccgaccaacgggtgccacacgcagttgatttggcccggcgtcaaggcatcgaagttgaatttattgaagatcctggtgacagcccgattggtcatccgaatactgccgaattaacgttagtcaatgctaaaaaatcattgaccgtttggggttgttcgattggtggtggcacgattgaaattcgtaaagtcgatttgaacggcattattttccaaccggaaggcccattaccaattatctttgttgaatccgaccaagaaattggggcggcattagatcaaatcttccaagataattatcgcgataagcgaatttcagtccgagtacccaaccgatttatgtataagttagatttagtcgataaaccttatccagaacagattgaacaagttcgtgggatgagtaaagatatgatcgtcttatagaaagtggtgagcctatatgtattgtaaaattcatgaattagtatccgcagccgaagaacgacatgtgacaatctctgaattgattattgaacaagaagttaaaatgagtcatactagtcgggaagttgtttgggccacgatgggtaaaaacctggatgtgatgctggcagctgaagaaaaaggggtcactggtgacggtgttcaatcggcaactgggattaccggtggcgaagccgttttaatgaaacggtatcgtgaaaaaggccaatcgctttctggtgatatcatgttggaagccgttcaaaatgccatcgcaactaatgaagttaacgcttcaatgggcatcatttgtgcaacgccgactgctggatcagcggggacgttgcctggcattttagcggtcattacgaagcaactcaatctcgatcgtgatgcgcaaatccgtttcttattttgtgcagccgcgtttgggatggtcgttgcgaacgacgcaatgattgctggtgcgacaggcggttgtcaggccgaagttggtagtgcctcagcaatgggcgcagccgcggcggttgaatcagctggtgggacgccacaacaatcttccgaagcatttgcgatggcgatgtctaacctattagggttagtttgtgatccagttgccggtttagtcgaagtcccttgtgttaaacggaatgtgattgggtcggtcaatgctttaacgagtgctgatatggcattagcgggtttgattagtaagattccggctgatgaagtgatcggggctatgaagagtattggtgagaacttaccatcaacattacgagaaaccggtttgggcggtttagccgcaacaccaaccggcattgcgttaaagatgcaaatttttggtcaggatttaagtattgaaaaataaatcaattgataacgtttaggaggagctccaatggcaaagaaactctcaaaatccgcatacggtggtgtaccgggtaaccagtacgttccctatgtgagtacaggcaacaagaaagtcggcaacaccgcaattttaattatgggtagtattttagctattattttcgctgcatcaactgcttattcaggtatgaaagccggtttgaccgttgcagccgggattccaggatcaattattggttctggattagtgggtgcgtttgccaaatcaaaagggattttaggcaagaacatcatgcaagggatgtccagtggtggtgaatcaatcgccagtgggatgatctatgtgttacctgcgattattctaatcggtggccacattaactttattcaaggggtgattgtcggtatcttggcaattctcttcgcaattgggacagcttcactagtgcataactacttaatcgttgaagaacacggtagattggtgtatcccgaagcaatggcgatttctgaagctttggtcgcttcggatactggtggcgattccctgaaatacatgggcattggtttcggtattggtggtgtcatcacgatgttaacgacttctgtttttggggttgtcaataacatggttagctacgttggttcatctttctataaatggaagttagacgttgaagtcaatccgctacttgctgggattgggttcatcgttggactagaagtgtcattgacgatgtttgccggggcattattatccaacttcgcaatcgccccattaatcggttatttcactgatatggccggcaatggtgcgcacgtttggaacaacgctagcttagccgttaaccaaatgtcagttaacgatttagcgagttcatatgtgaaatatatcggcgctgggatgatgctttgtggtggtttaattggggccattaagttaattccaacaattgtcacttcaatcaagaagacaataagcgctaaaaatagtacaggtgaagataaaaatacacttgggatgatttcgatcgttgccggggctgttggtatctttattgccgggatttttgttgcccataactttgcaatgggaatcgtgggtgcattattagctgttattttaagtttgttattcgtcattgtttcagcacgaattgctgggaccattggctgttctaatttacccgtttccgggatgacaattgcgtcattagtgattatgacggttgtcttcgtattattcggttggacagataaccaacatactgaaatcctattgatgttcgggactttcgttgtcacagccatcgctactggtgggggttacatgcagtctcaaaaagtcacttatgtgatcggtggttctaaatcagaaatgatgaaatatttcatgatttcagccatcatcggggttttcgtcgttatcggaacgattactattttagcaccacaatttgtatctgatagtgggacacccgcttttggtttaccacaagccaatttaatcgcaacgttaacatcaggtatcatgtctggtaaattaccatggatcatgattattgttggggtcgtgatggcacttgttttattcttcttagaattaccaattatgacggttgcaatcggcttctacttaccaatctcaacaacgtcaattattttaatcggtgcgttgattaaagtcttcattgaaaaggcaacaactaatgaagatattaaaaacaatcgggttcaaagtggggttagtctttcatctggtttaattgctgggggctcaatcatcggtttaatcgggattattttacacgtaactggtgtcttgaaagatcgtacaatcaatggttttgcaaatggcaacgggatggcactgattctcttagttgttttggtcgtctcaattgcggcaccactgatgatgattaagacgggaggttcttctgaagatggcacatcagaagactgaagttgatttagcaaccattgtgtaccggaagaatccaacggttcaatttgaactgaaaaaaggtgtggtcacgattattcggccccaaaatcattggattcaacgggtattacggaaactgcattttaagattccgcaaaacaccacgttaacgttagatgattatggcagttttgtttttcgccacatcaacggacaacgcagtgtctatcaaatcggtcaagcattggaaggccaatttgaagaagcgggtgattatctgtatgaacgcctactggtttatttaaaccatctggatcaaaacgaacatttagttcagcagataacccacgataccgagtagttcattaatttgtgaatcatgatttattatatatagataggagtttttcaaatgacagacagaatcgaattatcagcatgtacttcaatgatggtgggcaaggatgcgtcaattgatggctctacgatgatttcgcggaatgaagatcgctttcttgcgatccacacaaaacggttcttcgtacaaccagcagtcaaaggccggaccgaaacatatgtttcaaaatataatgggctaacgttacaattaccagaagatagctatcgttatacttcaacccctaatggtgatttgagcgacggtttgaacgaagaagacgggattaatgaaaaaaacgtcgctgtttctgctactgaaagtgtctacgctaacgaacgggttcttgcttatgacccattgcttgaaaaaggcgtggctgaagattcaatgtgtagtttggtgttaccatacgccgactctgctcgtgcaggtgttaagctaatgggtgattggattgctaaatacggttcagccgaaggtaatggcgttcaatatagtgatcaaaatgaagtatggtatcaagaaattgttacaggtcatcactgggttgccgttcgcattccagatgattgttacgcagtggcagccaaccaagttgcgattgaaaacgttgattttaatgatccagaaaattatatgtggtcagaaggtattcaagaattcgtcagtgaaaatcatttgaacccaagtgaaactgaatggaacttccgtaagattttcggaacggatactgaaaaagaccgtcattacaatacaccacgggtttggtatgcgcaaagctacatgaatcctgaaattaaacaagatccagaatcaagtgatttaccatttatccgtaaagcaaaccgcaaattaagtgtggaagatgttcaatatgtgttaaaatcacattataacgaaacagtttacgatccattgggtaatgggactgaggaacaaaagaccacttatcgggcaatttcactttcacggacgcaaaactcacacatctgccaaatcagaaacaatgtgcctgatgcggttaaaggtgtgcaatggttaggctttggtgtcccaacattctgtcctcacgtgccattctttacgaatgctaatgacacagatgtttcgtatcgtgaattacctgaaaagatgcaactaaacaatgcttattggttaaacgaagcacttgcaatggttgttgaatcacactatggtgcattcaaacaagccgacattgattatcaaaaagccttatcagaatgggcaagaacgcgaattgctcaagttgataaagccgttagtaatcaagcagatgcactcgattacctcacacaacaaaatcatgatattgcaacacattataaccaaaaaacgactgatttgttggcacagttagtaacagaaggcacacagctttctaaactaactttcgtgatggataagaacctatagacaaagtttaacggccttttgctgaatcgagccacacttcccgatggaagtgtggcttttttgatggaggtgttttaatgattgaggttcaagcgaatacgaaaaagattatcattgccatgatttacggtttcttggcggccgtcagtgttaatttatttttagtgccagcgcaaacttattcaagtggggtcacggggattgcccaattattaaccgcatttgtgagccatttgggcggttcattaagtgtcgctgcactggtttttattctaaacgtaccattattattattggcctggtataagattaaccatcagtatgcgattttcagcattgtggccgtcttcacaagtgttttattcttaaaattgattccggtacccgctcagccaatcgtgactgagcgctttgctggcgctcttttcggaggggctttaattgggttaggcgttggcctttgtttcaaagctggtttttcaaccggggggaccgatgttatcgtcaccttagtcggtcgtctaaccgggaaacgggttggcgctgtcaataacgtgattaatggcttcatcattctggccgcggggttattcttcggctggggcgctgcgttatacagtatcgtcgaaatttttgtctctagtttgttgatggattatatttatacccaacagcagcgggtgaccgtcacgatttttaccaaggatccagaaatgcttaaaaagcgactgcgcgagttcattcatggtgcgaccgaactagatggaacgggattatatacgaatgaagaaacaacggtcatcatgacggttgtttcaaaatacgatttaaccgccctacgtcaggttgtccaagccgccgatccaaacgctttcgtcaatattcaatcaacgatgaacctttggggtaaatttgaaaataatgaataagcgcaaaaacaagctgtaatagcactcaattgatgagtgctatcacagcttgttttttgttttaacgaatttgagtgagtgtgccatcggcgatttgccaaacgtgatcgactaaatctaagacccgttcatcgtgcgtaaccatgacggccgcgcggttttgttggtgaacggcggctttaatcgaagcgacgacttcgcggccgcgttgggcgtctaagctagcggttggttcgtcggctaagattaacggtggttcgttaatgagtgcccgggcaatggcaactcgttgtttttcgccgccggatagaatcttgggatagtgttgaagatggtgggcgaggcctagattagttagaatcgcttgtgctttgggtaaatcaacgtggcccgctaagcgttgaatcagggtcaattgatcttgaaccgttaagtatggaattaattcagcgctttggaagataaaaccaatctggtttaagcgaatcgttgtttgggccttagcggacaagctagttaattcttgaccggccaacgtgattgtaccggaagtcgggtgtaatagcgcgcccatgatggttagcaaggtgcttttaccagtgccgcttgggccaacgatggcggcaaattcgccggttttaatttcgaatgacacatcgtgtaagacggtattggtttgagcaccgtcgggatatgtcttagaaatattggttaattttaaaatcggttgtgacattaggcgtgacctccaatggctgaaattggatcaattctggtgacttgaatgagtgataataaggcgcttaagacagcgaccactaagaaaatggcactggtaccaccgataacggcgggcgttaaactaaaaggcatgctggttggcatgatcagactaatcccaatgatggcgccgtcagcaatcaagatggcaattaacgctaggaggccgatttcagtcagtaggtgattgactaaataacggttttgagcgccgagggcttttaagacgccgaaatcggctttcttttgcaacgtcatgatgtaaaagaaaatggccaagacgaataatgaaatcacgtataaaaagccaatcattaaatatagcgagctttgttcggcggaataacctggaatcgcgctgatgacttgtttggtggtcagcgtttgataaccggacgttgttgatttggtgtggtcagaaacgactgcgttaaattgcgttttggtactgggattaatcaggagaccctgttgcgcgtttaaataaataactgggctgtgtgaataggcggttgcagtggtgaaaccggcaatttggaatcgatgaccgctaatcgtatctttgaaccaatcgcctttttggtagccatcggtttgcaatttgcggctgacgacgacttggttcgttttttggttggtcaattgatgaccacttgtgatggttggggccaggaatgaattggcatcaaccacgaagtaggcgatatcggttttcgctttctggtgagcagtctgttgaatcgtcgcttgattaacgctgagacgcgtatctgacgttttagtagtcagtcgttgccaatcttgctcggtcagattagaacggtttaaacgtgcatcagcgtctttttgaaggatgaaggttttagcggtggtattttttaaggcggaaccactgtcgttggccaagccgttcgccaaaccggtgatgaacagcactaagaaaacaatcagaaaaataatgaaggccagtgcgctgaatttaaatttgctgtaacgtaattctttaagtgtgagaaacatggtgaacctcccaatcagttgatatctcaactataagaaagtttgctgggcgaaacaatcatcagaataggcgcaattgtgttataatgcacacaatcaacctaattgtggtgtaaaaggagttctttttgatggcgaatgtcgatcggcgtgcacgtaaaacccaaacagcgattttaaatcaatttattaatctcatggcgcaaaagccgattagcgagattacgattcgggaactcgccgaagccgccgatattaatcggcgtactttttacctgcattatacggatatttatgatttattacggcagaccgaagatcaggtgattgttcaatttcaacaggccttaaccacgtttacgaccgctgatcatgaattatcaacgggccaagcgtattttaagatgattatgcaatacgtgactgaacatcagcggctcttgggcgttttgtgtcagaatccggattcggaactgatgaataaattggtcaaaatgacgattgatgaaggccaacgggtgattgcatttaaagacccacaaatggcaccgtttattctaaactactgttgttgggggattatcgggattttacacacggcgatgcgccaagcgacagtcgattcggaaactttgaatacgctagtcgaccagctgttagtcagttcgttagcggtcggggagcaaccgattacgtttaaaaaatataaccaaataaaaaaacgaccaatccagtccggattagtcgattttttatttagcggcggttagttgttttaaattaaccactaacttgttattcaattcagaaacattcgttttatcagctggatcgaaatccgtaatgttaatgagggctgaattttcgtaaactttttcaacggtcccagtaaaaggagcgtccatgtcttcggtcactttaccagtgaccacatcgccgatattgaggctttctttatccattttaaaaactcctttagacttaattaaaattaccaaataagctgataataaactatgcgggattaaatagcaagctatatcatagctgaatcagattaatagcgcttaaattagaaattaatcagcaagtgctatttaaattggggcttaaataagctaaaatagaccctgtgttaccggttacaaaaaatggacgcggggagttaatatggaaccttatttaattttttcagatattgatgggactttagtggttgatcatcagattgtaacgccgtttaccaaacaggtgattcggacgttacaacaacgggacgtcattttttacatcgcgaccggccggttatataatctaggcaaggtgattgcccgtcagattaatgatgaggtccgaatcgtcgcatcgaatggggcggtttttgaagatcagaatcagttgagaaaaaagcggcttggtaaggcggccttaaaagcggcttacgaagcatcgcaagctgatccaggattatcagctcatttcttcacaactgatgcggtttattatacacaagaaatcccccgatttgtggcgcgggatgcggggaatctgacgagtatgggcgctgaaattacacatgatgcagtcaccgatttagacatgttaatgaacatgagtgatcaaattattaacgggattatcatcggacggggggttccaaccgcgctggctgatgcccgacaacggttaattgaccaagacgtgatgagtatttcatcttcgggacccgataatattgaattgattccgaaaaatatcgataaagccacggcgattcgacagattcaaacgttgcacgatattgatgctgatcacacgtttgtttttggggatggtcaaaacgatttagggatgctccaagaagccaaatatagcgtggcgatgggcaatgcattacccgaagtcaaagcagttgccaactacgtgactgaaacgaataataacgatggtgtggcgcgctttttacaacaacaattcaacttagaaattccgaatacggaagttggtttataagggttgacccgctttttatttttggttatactattatcacggtgttaaatgagccgtgagaatgctgttttagctcagtaggtagagcatcaccatggtaaggtgggggtcgtcggttcaaatccgataaacagcttataaaagtaaaaaataggtcgcaactttttagtgagagttgcggcctatttttaactcatttaggaggtattattatgcgctcagccgttttttatggtgccatttcgttagatggttatttagccgatcgggatcaacagattgattggttggagaagtttgaggtgcccgatgcgattaatcaagcttacactgattttatggcgaccattgatacgttgattatcggccggaatagttttgattacgtggcaagtcaatttgcagaatatccttacccagaattgatgaattacgtctatacatcgcgtccgttaccacaagcctccgcacagattcaggtgccgacgcagaccccgactgaattggtcaaaagtcttaaaaaccaaccggggcaagatctatggattgtcggcggcggtcggattgtgactgaattaatcgctaatcagcaattggataaaatgattattcaagtggcaccgattctattaggtggtggttaccgcttattcgaagcacttaatcagcaaacccaattcgaattagtgtcagtcgtcaaaatgggtcagtacacagaaatgacgttggttaaaaaataagctagcaaaaaacacagcccaacttgggctgtgtttttttgctttagtaacatgtttctctcgacttcggggtagtttaatgtagactgggaagcatcaagtccattaccattaagtgatgaagcgaggggaaaaagatgacgattggtgaaatattaaaggcaaaacgaaaagcattactgatgacgcaagaacaagtggctgaacaaattttcgtctcgcagaaatccatttcaaattgggagacccaaaagacgtatccggatattgatagtctcattcgcttggcccatctctatcaattatcgttagatcaaatattattggaagattcggatattgttaaaaatatcaagaaacaatccgaattaaaaacgatgcaaaaattagcaataccaccgatgataaccaatattgggctaaccctcttagcggcgactcagcattggtggggtccagcttcgatacaagcattaatcattattttgattagtatgtttgccaactttattccgatgttttattttaggataaaggtagatgaactagccaatcaagttgataaaaagaagcttgccaattggttaattgtactttatattgtggctgtgattatcatagccgttgtgattctacattttttacccaatctgtttaaatgagtcgttattttagattaggacgttagtagcggtagcggcgtttcatacaacgttgccggtaattgactaatcaatgggctaatttggccaatccccacaattgtaatgtcatgcattgctcgggtaattaatgtgtagagtaaatcacgatcgctagcttgattgaaggtcgctgccgaaacgtcgtaaccgacaactgcgtcgaattcaaggcctttagcgaggtataacggtaaaattaaaatccctttaggtaagctacgggtcgtatcttcaattaaggtgacttgttcatcgggcgtcagactcgcgtacaattgatgggccgtttgttgatccttggttagaatcgcgatggtcgcatggctttgttggagtcggaagagttcctgaacgagtgcggcgtggctatctgtgttggtcgttgtgatgacccgtggtaagcggccgtcacgactgaaggcctgtaatgcggtctcaggtggcaataaagctttggcaaagttggtaatcggtgcggtcgcacggtaactcttagtcaactgaatttgatttaacttcagttgtgggaacgccgccgttaactggtcaataaaatgaccgttttggtaactagcggtgaaaatatcctgcgcataatctcccaaggcggttagtttcgcgttgggaaaagcgtggtgaatatagatgaattgcgcaatgctataatcctgcatctcatcaatgaacaggtattgaatcccgtgattctgaccgctatcggtcaacaaatcacgtagatagagaatgggcgccgcatcgctgagaccgactaaatggcgttcattattttgggcgacttggtcaatcatcgcttgccaaacgttggctggcatttctgatggacaaacggtcgctaagaattgttggtattccgtatagatatctaagaaatagtcgttataaattgccgtatataaatcatcaaaatgagctttcacaatttcccgggcaataaaagcttgttcatcgtcgccagaagcaaactcgcgttgtccaatcagagcgcggtacgcatcgttggttaacccatcaatccggtcggcgacccaatcgagttgaacttctaagttaatttgccgttttaaccgttgaatcaaagtgcttttagtcgctagaaatttatcacccggcaacatgttgtgcggtaaggccatataaattgcattgatttggtctttggtgaagaacggccggtcttcgaaataaaggtcgttaaacgctaatggttgattggaaacttgtttgacgtaggtttgaatggcctgcataaagtcggcgctttccttaaaccggcgcatcgcttgcgttaattcggggaaattggtttggtctttttcaaagcggttaaagaggttctcaacttggagtcccgcgaaacggtgactgagaaattcagccatcgtgacttggcgcatattcttttcgcctagactggggaggacttctgaaatgtaatgactgaataagcggttcggcgagaacaacaccatttggtcggcttcgagttggtcgcgactgtggtacagtagatacgcaattcgttggagaacggcggatgttttaccactcccggcgaccccttggacgattaatagatcagcggttgtgtcgcgaatgatgtcgttttgatccttttgaatcgtggcgacgatgttttgcatgtattcgtcactctgttggcctaagacagcttgcaataattcatcgccaaccgtttcgttggtgtcaaaaaggtgttcaatatgaccggctttaattttaaactgccgcttgagggttaaatccaccgtcatggggcccatgggtgtttcgtaggcaactgggcctaaagtcccgttataataaatactggcaatcggtgcgcgccaatcatagactaggaattcatcgtcttcattcataaaagtcgctgtaccgatgtagagtgattcggattcaccgtcttcggtgatatcaatccgaccgaaatacggtgagtcggctaaatcagttaatcgttgttgttgactggttaataatttttcgttttcaacggcggccgccactaattgcttttgttgttgaacggcggcgttggtttccatccgatcatcgacttcggtaatattaattttggtattatcgccgtagcgttgttcgatatcttgggtttcgctagcagcattggccagttgctggttgatagtggctaagcgctgtttaatttgagtcgtcgtgatagtcacgcgtcgttgttcatctgctttggtattggcttcaatcatggttggcctccgattagttagtttttacattatagtcgcctttgtctcaaaaagcgaccgattgacattttagttaaagttcgttaagatgacattaattcaacagacagtgtaaaggataagtaattagtttgctcttttgaacaggaagcgacgatactgagaagtcgccagattcaaactaatgaatggccctttaatcaggaattggcgataaaccaattcgggtagcgcccttatcgcatgagtggcacggtttttttcgtgcaatttaggtggtaccacgtgttagcgtcctaattgtgaacaacaattaggacgctttttttagttgataaatgaatattggaggaaatcattatgacaaagaagattattttaacaggtgaccgaccaactggcaagctccacattgggcattatatcggttcattacgcaatcgtgtgacgatgcaaaattcaggggattacgaaacgtttattatgattgccgatcaacaagcgttaaccgacaatgcgcgtgatcctgaaaaaattcggaacagccttttccaagtcgctttagattatttgtcagtcgggattgatcccgctaaatcaacgatttttgtccaatcacaaattccagcgttgagtgaattaacgatgcattatttaaacttagtgtcagtgtcacggctgcaacgtaatccgaccgtcaaagctgaaatccaacaaaagaattttgaacaaagtattccagctggtttcttaatctatcctgtgagccaagctgccgatatcacggcttttaaagcgacaacggtcccagttggtgacgatcaagaaccaatgttggaacaaacgcgtgaaatcgtgcggacgtttaataacgtgtatggtcaagaaattttagttgaaccagaaggcgtgttcccacctaagggcgaaggtcgcttacctgggttagacggcaatgccaagatgagtaaatcattgggcaatgcgatttatctatcggacgatgctgaaacgctcgagaagaaagtcatgtcgatgtacactgatccgttgcacattaaagtgacggatccaggtcatatcgaaggcaacacggtcttcacttatttagacgctttcgacgaagatgttgacaaggtggccgaattgaaagcacaataccaagccggtgggttaggcgatgtgaagattaaacgttacttaaacgaagtcttacaagcaaaattcgcaccaatccgtgaacgacgcgccaaatttgaaaaagatcccgctgcggtttacaagatgttagaagaaggcagcaaaaaagccaacgcagtcgcagaacaaacgctaaaagaagtcagagcagcaatgggcattaactacttcggttagagtgcgacggagctgtccagtttctgagtatagcctagagtggttaattatggccgttttttggccatgattgaccattcgtagctagacggaagaaactagctcaggagcacgttttagttagaggtcgagcacgttttggctagtaccacattaaaaatagcgttgcctagtattcgtaaagaatctaggcaacgctatttttgtctgatgttaattaaaactgtttgagtcctttatccaacaatttgccaacaactggtaatttaccgaattcagaggcgtcgtcagttgggacaacgactaagttagcggatgatttcgctaaatcagcaaaggcgttgattgattggttttggaaatacttcgtatcggcgttcgctaaaccagattgaacggtatcaatccggtaacgttcggcatcggcgcgggttttagtcgcatcggcttctgctctagccatggtcatcaaggcgtcatttttagctttggtggttaattcgattgatttggcttccccttcggccttagcaatcgttgcgacccgttcacgatcggcagtcaattgtttgtccatcgcttcttgaatcgctttagaaggggtcaattcatcgatattaatccgatcgacgttaatcccgtaagtattggttaaatcgccaatcgccatcgcaagttcctggttaattttagcggtcgaaccaagcgcttcatttaaatccatccgaccaatgatatcccgtaaatgaccacgaacgagttgggccattgattcaacggaatccgtattttcgtattgatatttaacgccatcggtcacgtgatagttgagcgtcacgctagctgaaacgtctgcattatctttcgtaatgattgaataattaggcagtgaaagtgggcgcatggccaagctgactttgcggactttttgaataatgggtatgtaaaattgtaaccctgattcaacactccgtccgtatttccccaaagtttcaattagacctaagttgttttgtggaataatcttaatccctaataccataataaattcctcctccaagagatgttgctaaattttttgtaacgttagaatgttccccacagcatcgacgaccgcgtatcggcttgtcggttcgaccggtgaattatcactgatcagataccgataataaatccccgtgaccgtcaccagaccgttatctgcgttgatttgagcgccgttaatcacttggccgataatctggcgttgttcaaaattatcgccttgcgttgctttgtgaagaatcgtttcgatatgcgcattgatactgcgattctcctgatctgccgcctgtgataattgatcatatagttgttgatcgagacgcagtagaaatcgtttcttttcatcactcaagattagacctccttaatatcaccttgatatcatgatatcaaattgatattaaatatgcaaccgttcgcaattttaattttagatttgcgtcattaattgtggaaacgctcttgtattttgtcggttttccagtaagctaaaagataattaggtcatgaaggagattaacaatgcacgatttaacgaaggggaacccgcttaaattaattattctattcacagtaccgctgttgattggcaatatttttcaacaactatatagtgtgattgatacgttaattgtagggcggataattggggttaatgcgttagccgccgtgggatcaacgggtggtttgaatatgttaatcatcggtttttgtacggggacgaccgcgggtttatcaatattaactgctcaacggtacggggcgcaagattttaaaggggttaaacgcagttttgcgaccagtatcgtgattagcgttgtgatttcaatcattctgacgattattagtgtcatttttgcgcgacatatcttagtcatcatgaaaacaccggcgagcattatcgtcgatgcccagaaattcattacgattattttcgccggtattatcgcgtcgatggcctttaatttactgtcgaatatgattcgggcactcggcgatagtcggacaccattgttcttcttagtgattggggtgctaatcaatattgtctttgatttcatcttcattttaggcttccatatgggcgttgaaggggctggttacgcgacagtttcggcgcaagtcattgcagccttattgtgtttgatgtacatctatcggcatattccggtgttagtgttacggcgtaaagattttaaaattacccgaaaagacatcaacgaacatctcaaagtcggcttaccaatggggtttcaatcgtcaattattgcgattgggtcgattgtcttacaaatcatgttgaacacgttaggcgccagcgcggttgccgcttatacggcagctggcaagattgatcaactggccacccaagtcggcaattcctttggaatcacgttggcgacctatgccgcgcaaaattatggggcacgccaatatcaccgaattagcaaaggggtacagcagacgttggcggtttcgattattttcagcttagtgatgggcgcgttaattatcacgtttggccggccactcgttaatctatttatcggtaatcaacaaccgcacgtcaccgatttagcgcaaatttatttccgctttaatagtagttgttactttattttagcgattctctttggcattcggtacacactccaaggcttgggccaaagctttatgccaaccttggcggggattgccgaattattgatgcggatttttgccgggatcattctcgtgcggacgatgggcttcaccggggcgagtctagccaacccattagcgtggattggatcgtgtctggtcttattcagttcctatttcaaaacgatgcgcaaattaaaacagcgggcggaaaaaattgatccggatcgcagtacgccagaggagtaaagtatgaataaacgatggattgttggggcaatcaccgcggtggggttattactaagcgggtgccaagttcaagcaccaagtaaaacgagtcaatcagcttcatcaacgaccacgacgcaagcgagcgacgccacgactttagccaagcaaacctttagggccgatgatcaggcgtatcaagtggttaatgagaatcaatcaaccttgaaaccggcagcgtggcagacggagaaaatcgactatggggcgctggatcaattgaatcggaccacaacgaataccgcctatctgtcagatcgtaatttaggccgttcgaatacccgtggccgacagaattggcgaccaactggttggcacaatcaaccagttagaattggcgggaaacaagtctttccgcagagtcgtgggcatttaatcgcctatgccatcacgtttaatttcaatcaagatggtcagtatcaacaggggcaactagggagcagtgataatcctaaaaatttagcgacccaaaccgaatttagtaatcaacgaacgatgcagatttttgaagatcaggtgcgccaagcgttgattaaacataaaaaggtcatttaccaagtgactaccgtttttcgcggttcagaattaatgccgcgcggttattggttacaggcgatttcaaccgacaagtcgttaaactttaacgtctatgtttggaacgtggaacccaaaatgcaattcgattacgttaccggtcgtggtcgggttgatcaatcaatgacggtcactgatcagtaccaaggcaatcggtatacgaattaaaggggatgaaacgagtactggataattagttttgtaaggtcgataatgtcttataaatataataggtttggtgggatgaccatggctggaatcgtattaactgttcgattcttgttagaaatgataacggtattgggcctgctattgggagtttttgttggccaaacaagcgcgtataaaataggttatctgattttaggaatcgggatgacatttatttggtctagatatggcgcacccaaatcatcgcatgtgttgatggggatttataaatttattttagaggttgcggtttatgccattggtagtattgcattttatcagttgtttggaactaaaatcggaataatctatctggtaatcgtcctcgttgacttactattgatgtatgttttagaattacagggaaattgaaaaataatcgaaaataacgcctgatgatattgctagtcattaggcgttatttttattaatattcaattgttgatcataattaaaacatgctcctaggctagtttcttccgtctagctacgaatggcaaatcatgaccaaaaatcggtcataatttaccactctaggctatactcagaaactgaacagctctgtcgcactctaaacgtgtttttgagttgcaacaacttccgcttaatctaaaataacgtattatgactgggaaacgtcataatacgttatttttattaatgctcagttgctaaccgcaactaaaaacactctaaggcaagtcattgcctgccgctaggtataggtcgtaccattctctgcgggttaatttgactttgtcagcttcgcagatttcagttaggcgtttagggttcatcgtgccaacgacgacttggaggctggctgggattctgagcaaccaggcactagcaatcgcattgctgttcgtgtcgtgggctttagcgatggcttggagttgttggttgagttctgggaattttggattgtcgataaagacgccttcaaagaaaccgtattgataaggactccaagcttgaatcgtcatgttggtgagtcgtgaatattcaagaataccaccgtcgtgatttaagctgcgcgcatcggtcatgttggtgtgcatcccgaaatcaatcatgccagtgtgcatcaaactcatctgtaattggttggcaacaagcgcttgtgggacggcttgttgtaacatatcaacttgcatcgggttaaaattgctaaccccgaattgacggactttgccggtgttttgtaattgtaaaaaggcttcagcaatctcatccggttccatcaatggatcaggccggtggagtaatagcgtatcaacatggtctaattgcaaccgttgtaagctcgcatcaacggcttctaaaatgtgttcttttgaaaagtcgtacatctttttaccaatcccgactttcgtttgaatcaaaatatcatcacggttaatttggctattttttaaagcttggccgaatttaacttccgaagcaccgtcaccgtatatatcggcgttatcgaagaaattaatgccttgttcatgagctgtttcgagcatcgttaacgcttcttgatcacttaaatttggaattcgcatgacgccccaaacaatttgggaccccaataaaccactaccgccaacattgactttttgcacaaataacactccttcattaaactgtattatcttaaaattaccacttattgccgtaaaataaaagaaagagctttcattataaataagggtcgtgaaatggctggaatttttgtatactgaattgagcaagtaggaggcaattgaatgactgataaaaaagcacaagcaccccggttaaatccggcgctacaagctgtgagtacgattgattggcaaccagaagaaacctatgaaggcctggcagtcacggatatgacggtcgatgaaacgactttatcctacaattattttaagggcagtcattttaaaaacgttcagtttaaccaagttgattttaataattgtgattttcaagatgttctttttgaaaactgtggcttattgaactgtaccttgattggcaattcattcggacgcgttcagtttgaaaattgtcagttggtggggagtaacttcgctgaatctggtttgagtgatacggcaatcatcggttgccaagcagattatacgagttttgatcagacccgcttacggcacgtcgatttattggataatcggttgcgtgagagtagttttcgcatggtggattggcaatggttaacgcttgcgggcaatgatttgaatcgggttgattttagtcggacttctttaaaaaagatcgacctcagtcaaaatcagtttgatgcggcgacttttacgttagacctgttacaaggtgcgacgttgagtacggcgcaaacgatggtgattatgtcggctttaagaattaacgtacgctaaaaaaacggcccgcatccagatatttaggatgcgggcagtttttgttctaataatcaatttgataggttaattcaactaattgaccgagtgtgcgtgtttgtttcaacgttaatggaatatcggttaagttggtgctgaccaatgaaacaccatcgccgagtaggacgggggcaatcgttaggatcagttcatcaacaagttgtgcttttaacagttcggtgaaaatatcggcaccgccgacgagccaaatattttggccgggttctgatttgagttggcgaatgaattcagacacattcccggccacaacggttgtgcgatcgtcggtgtcgtgaagtgtttttgagaagacgtaaccttgtttttcctgataagggtaagtcccagcgcgttggagggattgttgataagtcttgcggcccatgacaacggtatctacaccgcggtaaaattcttggtacgcattatcagcttcagctgaatttaaagcagccagccaagcggtactgccatcttcttcagcgataaagccgtctaaactttgtgcaagatataaaattactttgcgcgggtttggttctgtcatcatcaacacatccttcaattagattagttatagtataccattataaagcgctttaatctgttttgaatggttggtaatttaccgtgatttagcttatgatagtgagataatactgcgcgacagttgaaaggaagcatgcaatttggcaaatgaagacttatccccagcaattcaaagtttgttggcagaagtacaagaccattatccacaacaaattaaaattcgggtggctaacgaagcatctggtttcttgaaacacgaccaagcgcaacgcgtgatgaatgatgatgggagtttagcaattctattggccgatcaaacggcggctgattattcactatcgcacgaattattacatctcctattattatcaaccggttttccacaggtgttaacggaagtcaccacgcaagatgcacaattggacgaacagctaattgccactgggatgacattatacaacgcagccgttcacgtgattattcaaaaagaacaagtggcacacggctttgtcgatactgaagcgcaacaagcctatcttgccggtttccgcgataatctaaccccagagcgtgacgatccagagaaccggtggcttatttatcggattctcacgattttagacgcgttggtcttctttgaaggcgggaatcaacaactattacaacaatgggccaccgattatccacaagctttgccgcaagcccaagtgttatataaggtattgcaacgcaaaacaattgattcaccgtttgcgttacgccgagcggtggttaacttgtggaccgtttttgatcaaattttagaaacgttagggtttgctgccaccaatgttcaacaattattgacgttaacaccggtgctcagtgaacgccaactacgtttggaagtccgtcaagtctatgatgttttacattccgaccatttgttagccaacgatacgaatgaaatggcgtatgtcgggattggcaagagtgaccaacaaaatgcgttcgttttaagtgtcgccgccaaagatgccactcctgaatatttccaaaaaatctacgatcaaacagttcaagagtttttacaaagcattgagatgccctattcaatgcgttaattagaaggagtacacccatgttagaagaacaacgtcaaaagattgatgcaatcgatcaacaattagccgaactttttgaagcgcggttatcagtcgccaaggaaattgcgacgattaaatatgaaaataaaattggtttaacgaatattcaacgtgaaaaagaagtgatggattgccggttagaggccgttcaagatcctgaattaacggattacatgcaagaattatatcaagatttatttttaatctcgaaacaatatcaggttaaaaccatcaaagccctccgagaccaagatgaagattaatcaacgtcattaatggccaacagactgagcggaatttttcgtttcggtctgtttggtgtgaccttgaaaacggtaagaagcgaccaacggtttttgaggctaagtatgctaaactagagttaattcacaaaacgtgaggatggttatcagtgacaaaacgccgttataatttagcaattatccggtatcaaggtgagctactattattaaatcgactaaaaaaaccgtatccggggatgtggaacgggattggtggtaaacgtgaagcgtccgaaactgtggtgcaagggatgcaacgcgaaatttttgaagagaccggtttgaaccaaacccaatatcaactccattatacgggatggttagactggcacattgatgggcaattcattgacggcattgatttatttgtggccgaaattgacccgcatgttcaattaccactctatccaaccggaacgcgcgaaggtattttacaattacacgctgaaaaatgggtactcgccccgaataattatggggttgtggccgatttaaaggcgattctaccagaagtactcgcattacacgtcaatcggttctacaccgattttcacgaggatcaattaattggatttgaaacttttccacagactgaagcagttcctgtggattaagttcgctaggaggccccaaatgatgacgaaagaccaaaccttaatggttttaaatgtcttaaagaagaaattacaaagtttacgcttattgcggattgtggaagaattattttcgctatacgtgattatcgaagtctttaccgcgagcaaccaaattattttatttgggatcagtttttcagagaaaaatgccgtgatgttaatgctctatttattaatcatcgatttttgtattaaccggattcgggttaattataagaagaccggacaacaactgatccaaacgctcaagaatctcaccgagcaagaacaactatttgtgaaacggtttgaacgcttttaggaggttgtgatgattacgattggtctaacaacttggtcggaacatgcgagtttgatgccggcaaaaaaacaattaacgttaaatgattacgcccagtttttaccggtcgtcgagattgatagtttttattatgccttgcaagcgccgactgtcagtgcgaattggctggcgcaggtcccgcctagttttcaatttatcgtcaaggcgcaccaagcgatgaccaagcaagctgattatcaagacgtgactagcactgaaaaggaattgtttactcgctattaccggtcgattgaaccgttaatgcgagcgcatcaattgaaggcggtgttatttcagtttccaccgtatttccaattaaaccaagagaatagccagtatttacgacaagttcgcgcgtggttaccagacgtgccgattgcggtcgaatttcgccatagttcatggtacgatccagcctttaaagcgcagatgtacgcttttttatcggaattaaaaatgactcatgtgattgtcgacgaagcgcaaacgccgaacaacagcgtcccatttgacccggtcgttaccaatccagcattagcgatgttccgcctgcacggtcgcaatatggccggttggcagaatccgggggcatcttggcgtaaacagcggacgctttatcgatatgatgcgactgaattagcgcaattagccaaaacggttcaacagttgcaatcacaagcgcaagaagtggttgtgatttttaataataattcaggtggcgacgcagccgataacgccctagaactccaacaattattaaacctaaaattcgaaaacctagccccaaaaacgccagaacaaataaacttattttagagcgctgatcgagcgcttaatcttcgagcataacctaagaatagccattatggtggtattttaaccatgatggcgattctgtcgttaggcggagaagattgctcgagaagcacgtttaaaatcagagtgctgactgagttggtcagtttctgagtatagcctagagtaggaaattgtgaccgaattttggtcatgattttctaatcgtagctaaacggaagaagctagctcagaagcgcgtttaaggaacagagtgcgttggttgcggggagcaattgagcattaacagaaagtgaccagttatctagggcttaagataattggtcacttttaggttaagcggaagttgctgcaaccaaaagcacgtttaaaatcagagcgcgagtgctcacggaagattctgagcattagcctagttaggcgaataaaggccggtctatggactttgtttgactaacgtcgctaagcacaggaatctgtgagaacgagcgcgtttaaatcagagcgttaattcgagtcgttcaggctttgaggattaacgtaagaaccagtattgtgatttgctttttaatcatgatgctggttttgttgttaaccggaaaagactactcgggaagcacgtttaaggaacagagcgctgtgagtcatgttcagcaattgagcattaattaaaacaaaccagtaatctagggttcaagattattggtttgtttagattaagcggaaattgatatgactcagaagcgcgttttgtgctataattcaggtacttatatcgatgattaaaaacattcgagaatacgcgatattctcgttttttttattaaggagaaagcatatggcagacactaaaccaactttttacgtaaccaccccaatttattatccttcaggtaaattaacaattggtaactcatacacgacaatcgcagccgatgtgattgcgcgttacaaacgattaatgggttttgatgtgttctttttaacggggactgatgaacatggtttgaaattggaacaaaaagccgcagaaaaaggcttagatccccaaacctacgtggatgggatggctgctgaaattaagcaactctggcaaacccttgaaatttcgaacgataaattcattcgaaccactgatgattatcacatcaaagcggttcaaaaaatgtttgatcaattattggcacaaggcgatatttatctgggcaaatatgaaggctggtattctgtttctgatgaagaatacttcaccgaatcacaattagccgaagtttataaagatgaaaatggcaagatgattggcggtaaagccccatctggtcacgaagtccaacgcgttgaagaagaaacgtacaagttcaagatgggcaagtatgcggatcgtttattgcaatattacgaagaacaccctaactttattgaacccacttctcgtaaaaatgaaatgattaacaatttcattaaacctggtttggaagatttatccgtttcccggatttcatttgactgggggattcatgtgacgggtaatccgaaacacgtggtttacgtgtggttagatgccttatccaactacatcacggccttaggctatggttcagccgatgatgcgttattccaaaaatattggccagcagacgttcatttagtcggcaaagaaattgtccggttccatacgatttattggccaatcttcttgatggcattagatttgccactgcctaagcaaatttttggtcacggttggttgatgatgaaagacggtaaaatgtctaaatctaaaggcaacgtggtctatcctgaaatgttggttgaacgttacggtttagatgccttgcgttattacttaatgcgcgcaattccattcggtaacgacggcgtcttcacacccgaagatttcgtcagccggattaattacgatttagccaatgacttaggtaacttgttgaatcggacgattgcgatgatcaacaaatataatggcggtcaagtcccagcttatcaagcagacatcactgaattcgatgctgatttacaagcgaccgcgacacagtctgtggcgcaatatggtcaattgatggatcaattgaaattctcagatgcactagacgcggcttggcaattaatcagtcgcgctaacaaatatatcgacgaaacccaaccatgggtcctcgctaaagacgccagccgtaaaactgaattagacagtgttttagcccacttagcggaaagcttgcggattgtcgcgctcctattacaaccagttatgacgcacgcaccacgcgaaatgtttgcccaattagggttagatttcgatgtggctagccaacgtgatttaacgtatggcgctttcccaagtgacattcaagtggtcgctaaagggacgccaatcttcccacgtttagatttagatgaagaagtcgcttatattaaagcacaaatgatggcggcccaaaaagctggcttagtgaatgaaaaagtcaaggcgaaggctgaaaaggctgccgctaaaaatgatttcgatcctaaagcgactaaattagtcagtgaaaaagctgaaattaagtttgaagatttcgatcaatcagaaattcgggttgctgaaatcaaagccgttgccaaagttgaaggggcagataagttattgaagttccgtttggatgcaggcgatgaaggtgatcgtcaaatcgtttccgggattgccgaattttatcctgatttcgaacaattagtcggccagaaagttttagcggtcactaacttgaaaccccgtaaattacgtggtgaattaagccaagggatgttgctatcggctgaacacggtgatcaagttgaattagcctttgtgcccgctaacctcgttaacggttcgcaaatcggttaagctagattaaatagaacgccaaaatagggccatcaggcaagattgttgttctagtgtgcaactagggggacaccgtgtcggttgggcctattttagagcaaaaatggtaaggagattgtcgcatgcaaatatttgattcacatacgcatttaaatgatacgccctatgctggtcaagaagcggattttatccaacaagccgctgctttagacgttgttgaaatggcaattgtcggttcagataccgttttaaatgacggtgcgctccggttagcgcaacaatacgctaacctgtcagcgattatcggttggcatccagaatccgctaaggactatacgaaagccactgaagcgactttaattgaacaattacaacgtcccgaagtggtcgcgttaggcgaaattggattggattaccattgggatacgtcaccacgcgatgtgcaacaacgtgtttttgcgcggcaaattgcgattgcgaaatcattaaacatgccaatctcggtccatacccgtgatgccctagaagcgacgtaccaaattttgaaagaaaatgatgttcgcgactgtggtgggattattcatagctttaatggcgatagtgaatggttgaaacggtttatggatcttggcatgcatatttcgtttagcggcgtcgttagttttaaaaatgcgcatgacgttcacgaagcggctaaaatctgtccgttagacacgatgttagtcgaaaccgacgcgccgtatttaaccccaacgccttaccgcggcaaacaaaatcaaccgggctatacctggtacgtcgtcgaagcgattgcgcaattacgggatgttgatccggctgagattgcggcggcgacctacgccaatgcgcatcagttatttaagttaggagccgtatgaaaaaaacaattcaagaagtgattgtggtcgaaggccgagatgatacaaaacgcttaagagaagttttcccagacgtggatacgatcgaaactcgtggttcggccatcaatgatgaaatcgtcgaaaagattgcgttagcccaagaaaaacgcggggtgatcgtcttcactgatcccgactttcacggcgaaaaaattcggaagattatttcgcaaagtgtgccgggtgttgaacacgcctttttaccacgtgcagaagctaaaccggataaaagtggtggcagtttagggattgaacacgctaaaccggccgcgattcgcgaggccttagcccacttattaacgcaggacgaagatgcggatgaacaaattagtcaatctgatttgttagtcgccggtttaattgccgggccagccgctaaacgccgccgcgaattattaggcgaagtgttgcatatcggttataccaacagcaaacaactctacaaacgcttaaaaatgttccaagtcacgcaggccgaattcggtgcagcgctcagacaaatcaacgaagaattaggagaataacatggaagacattgcaaacccagaacgaactagaaaaattctgaaacgttacggttttaagtttaagaaaagtctagggcaaaactttttaaccaacatcacgattttgaaacaaattgtggaagctggcgaaatcacaaaggacgatgacgtgattgaaattggccccgggattgggtcgttaacggaacaaatcgcccgtaaagcgcacaaggtattgagttttgaaattgatgaacggttgatgcccgttttaaaagatacgttgaaccattatcataacgtgacggtcttaaatcaagatatcttggaagccgatttacaaacgattattgctgaacattttgatggtcaacataatttgaaaatcgtggccaacttgccttattacatcacaacgccgattatgttacatttactcgaagctggtttaccaatcgatcgtatggtcttaatgatgcaaaaagaagtcgctgaacggattaacgccgatcccggttcgaaagcctacggttcattgagtattgccgtacaacttcattctgaggttaaattagccttcatcgtgccaaagacggcgttcatgccccaaccgaatgtcgattcagccatcgttgaattagtcggtcgtcaagccccactcgtcacggttgaaaaccaagaattatttgaccaactggtacgcggcgcttttgcccaacgacgcaagacgctttggaacaatctacagaatcaatttgggaaacaagatgaagttaaagcagcgctaacagtcgctttagaacaagccgacatcgcaccaagtacgcgggctgaacagttaagcattcaacaatttgcgcaattaagtgattgtataaacgaacagtcaatttttgctaaaaaatagaataaataattgctaaaacgttggtgcaatggtataattgcaaaatttcagtttatgtgctatactattactcgaagaggtgaagtacatgccaacgacacttgccaatattaaaaacggtctcgatgaacacatcggagacaagttgatggttgtcgctcaagctgggcgcaaaaaggtaacaaaacggaaaggcactcttaaagagacctttcccgcagtttttgtagttgatttggaccaagatgaaaatgcgtttgaacgcgtttcatacagctatgccgacttattgactaagtcaattgaaattgagtttgatgatgaaccagttgcgctttaggctggacaatagaatatgaatcgaatgcacccaccagaatctggtgggtgtttttttgtagttggcacgttatcaatcaagcgggttgactagttattgacattttctgaaaaaagcgatatcgtataaaatgtttatggcatatacaaaaaggagaattgtatgttttcaagtttaaaatcaaatcggggacggctgatcgctttcattacgttgatctgcttaattccaatcttgttattattcattatttttaatttcgtgaaacacgctcaaaattcaacgacgcagaatctaaatgtggcggtgatcaatcaagatcaggctgcgacgtttagaggcaaaaaagtcgatgtgggccaagaggttcaagcgcaattatcgaaggaccatcaagtacactggcaattcgttagtgccaaagaagcaaaagccaatttaaaaaacggccattacgtgatggccgtgacgttaccaaaaggtttttcaaaaaacgttacgacggtgcttgataaaaaaccacaagctagcacgatgcaagtggcaacctcgcaaaaaaataattatttgacgggtgtcatcaccaaccaagtcactgaaaaaatgcaaacgcagattattaaaagtattcaaatcgcttacgaccaagccttgctaaaagcaattgggactttaggcagtggtgtgactgaggcgagccaaggggttgaccaattggatacggcagctgaccaacttagttctggtagtcagcaaatcgcgactaacttagttaaactacaagcggggacgcaacaactagcaacgagcgtgaccgctttaccaaccggcgttcaacagttaacgaccggtagtggtcaactggcaacgggtttacaacaattagcggatcaaacgcaaccgttgcaaagcggtgtccaacagttagcaacgggttcaacacagttgaacgctgggattagccaatacacggcgggggtttcgaccctagacggtggcttacaccaattgaccgccaataatacgtcgattatggcgggcagccagtcgttgaacggcggggtcgatcaactagcaagtggttcacaacaactcagcaccaagttagcggaagcatcggctaaaatcgatgcgagccttagcggtagtgaaccccaaatgaaccaattgaaagcagggctacaagccttaaatgcaagcattcaaacgttaaatcaaaaagtgagtggtggtagtacgagttcgaccacgattaaaaatgatttattgaagattgcggacaataccaaacaaacgggtgtgctattgcaagatagtggtagtcagttaagtcaaattaacgataaagtttacaacgcggctaaaagcgacagtgtagccagccaagtcgcgagtgcgggcacgcaattaaaggctcttcaaaaactagccactagtaatactgatttcttggtctttttattaggccatccagacgtgatgtctcagttacaaagcatctcaaccgcagcggggactaatttaacggcagcaggtgcccagttacaatcatctggcgcgaatatgcaaaccctacaaaccaatatcgggacgatgggtgcgaagatgacggataacggcacacaattaaccgaggtttcaaccgaattaaaaacgacggctgatagtatggcgcaattacaacaagcgattgcgcagatggccagcaaagatcaagcaccagcagccttaacgggtgcggttcaagcgattgaccaattaacggctggtttggcggaagtcaatactggtttgaaacaacagggaacaacaactgacacgatgggtggtcttcaagcgactaatgccattcatgaagggttggttaaattgcaaaccgggttacaagggaaaaatggtttagtgactggtttacaaacctatacagatggtgtggccactgcacaagctggtagccaacaattagcagcgaataatcaaactttgaatagtggtgcgggtcaactcaacacaggcttgagcaccttgaaccaacaaacgccgcaattaacgagtggtgtccaacaattaaatacgggcgctagtcaattgaatacggggctgaacacgttaaatcaacaaacaccaacgcttctagccggtgtgaaccaaattaatgacgggacggggcaattagcgactggcgcgacccaactagatagtggcatgcatcaagcaggtgccggtattgctttattggatgtgaaattggcagatggtagtcaacaagttaaaaatttggcaaccggtacgcaaaatgtgaaccatttaatgcaacccgttaagacgcaattaacgacgaaatcagctcttgaacaactcatcaatgtttatggaccactgattttaacgttaattttcttcgtcggggccttattaacccaatcaacgttgtatcgtcaaacggagaacttaacgagtggtaaattacgcaaacggattttaacagtgacgggtgtgattgcggttcaagggattttaatcgcgagtgtggctaagttattaggcttagaagtggctcaaccaatggccttcatcgtattaagtttactgattgccgcaacctttacgttagcttgtttagcgttagaccgcttattcggaacgttaggggttttggtgggctttgctttagtgtttgtccaattgatcatgatcgccggaccattccaaagccaactcttgtcaatcacgtaccgattcgtggcattcttcctaccggggacttatgcggttaacggattagaacaagtgattaacgggaccggccaacatttagttgggagtctgttcgccctcatcattttctgtggtatcttcttcatgggattatttggtcaagaagtcaaaaatcatttgttgccaactgcaaatagtcaagcctaagcatttatgttacagttaaggaaagtaaatgaagcgagggattattgtggaagatagtcaattactggatgagtatattgagctctatatgtcatccatcaagtatgtcgaagacttggtatcagaaccaaccaaagcgtatcacttatcttttgagcagtatttaatcatgaaagaaattgccgaagatagttcggttagtttaattgatattgctagaaaaagacgggtgacgcgcggtgcgatttcacgccaaattcgggtactcttgaagttggactatattacacaagaaattgatcctaacgatcgccggcgtttaattctaaacttaacaccgaatggcttagcgacagtccatgagattaatccgaagattcatcaacgctttgcctcatgggttgagacgtttggcatcgataattcaaaacaaatgttagcgttaatgaatgaatttcggcataagattatggccaaagaagttaaagcagcacaacaaaagtaaaattaattaaagcagcatttaatccggcctattgcggattgagtgctgtttttttgtgggtgccaagttaaacgtgatttggcatttttgtcagaacttagtataatgaaacaattaaatgctaggtagacggtgaaagaatatgcaattaattgagaaagcacccgcaaagctgaatttaagcctagatgctctttatcaacatccagatggtgaacatgaatggcagatggtgatgacgtcgattgacctggctgattatgttcagattacagcccaaaaatccgcgaatatcgtggttaaaacgacgagtggttttattccagaagatcaacgtaatttggcctatcaagcggctaaattattacagcaacggtttaagattaaaaccggtgcgttaattgaaatcgaaaaacacatccccgtggcggcggggatgggcggtgggagttccgatgctgcggctgtcttaagagggttgaaccgattatggcagctggggttgtccaaagccgagttagccaaaattggtttacaaattgattccgacgtgccttattgtgtttacagtgaaacggccttggtgaccggcaagggcgaccaaattcaaccgctagggccattaccaaatttatggttggtcgtggttaaaccggcgattagtgtctcgacacctagaattctgcgcgctttgaattgtgatcagattgaaacgcgaccgaacacggcgcaattagtccaagcgattgcggcccaggacactgatcggttagtcgctggtatgaataacgtattagccccaatcacgagtgcccgctatccacaaattgaacatttaattgaacggttagaaacttttggcgccgatattgcccagatgagcggcagtggtccgacggtgtttgcggtttgtcgccagctgtctaaggcgcaacgggtttacaatagtatttctggtttttgtaaggaagtttatttggtccaaccgctgaaataatcagctgacttaaaatggctatcattccgaattttaggaatgatagccattttgtgtggtgcgacggccaaatcaaaacgttcggctaatctgattgggaggtttccgacggttaaatcccgttataacaagcatggaatgggtttcgcagcgaaagtaattgtgataaaaacgaacatttattgattttttacaaaaaagactaggattttccgattaaaatctatataattggaaagcggacagcttttttcggaaaaaattaaatgatattatagaggagtaaatgattatgaaagttagaagaagtgatcgactaattgatatgacccgttatttgttagaaagaccccatacgttaattccattaacctttttttcaaatcggtatgaatcagctaaatcatcaatcagtgaagatttatcaatcgtcaaacggactttttataaccggggaaccgggattttagaaacagtaccaggcgctgctggtggtgtgcgttatatgccgatgattaaacaggatgaagccgaaagttttattaacgaaatggcggaacgcttatctgaaaatgaccgcttattgccaggtgggtatgtttatctatctgatttactgggtcgtccagatgttttacgtcaagtcggtcgtctgattgctaaccaatacgtcggtaaagaagtgacggccgtgatgaccgttgcgactaaggggattcctattgcgcaaagcgttgcgatgtatttgaacgtcccgtttgtgattgttcgtcgtgattcaaaaataactgaaggttcaactgtcagtgtcaattacgtgtcaggttcatcagcgcggattgaaaagatggaattatctaaacgcagtttacccgttaattcaaaagtcttgatcgttgatgactttatgaaaggcggcggcaccgtcaacggaatgaagagcttgattgaagaatttgattctgaaatggtcgggatttcagtttttgctgaatccgtctttgatggtgatcggatgattgatgattacacgtctattttagaagtcgataaagtcgatattgaaaataagacgttgagtgttagtgccggaaactatttaaccaagaatgtagaccaattagtgtaaataacgttaaaagactagagcaatgctgattatgcattgcttttttctatggacaaattttaagagttgtccgttgcatttatgacagcgctatcatatagttaattatataatatgcaggaggatagacatgaagaaaataatgaatcaacctagtgatatcgtgacagaaatggttcaagggttagtacgaagttatccagagttattaaaacaaattccagaaacggaagcagtcgtttacaatcaagatttgaattgtcatcctcaagttggattaatcagtggcggtgggagtggccatgaacccgcgcacgccggttttgtaggcgatggaatgttaacggcggcagtctgcggtcaggtcttcacgtcaccaacgcccgatcagatttatgcagcgattaaagcggccgatgctgggcgtggtgtttttatgattatcaagaactattctggcgatgtgatgaattttgaaatggcgcaagaaatggctgccatggatgatattgaagtccgttcgattgttgtcgatgatgatattgcggttgaagatagtacttatacgcaaggtaagcgcggcgttgccgggacgatcttggttcataagattctgggggcctatgcgcgcagtggtgcggaacttgaagccattgaacgcttggcgcaacagattgtgcctaatattaagacgattggggttgccttgagtggtgcgaccgttcccgaagtcggtaaaccaggatttgaattggcacctgatgaagtcgaatatggcgtggggattcatggtgaacctggttatcgtcgtgagaaattacagagtgccgaacaattagcaacagaattagtcggtcaattgaagaaagcccaccatttaacggcgggtgaacattatgcggtcatggtgaacggtttaggcgcgacgccattaatggaacaatacgtctttatgaataatgttttagaccaattagcagctgaaaacgtggtggttgatttcacgaaggttggcgattacatgacgtcgttagatatggccggtgtgtcattaacgttaatgaaattaatcgaatcgaattggaccgataaattaaaagaaccagtcacaacaattggctggtaaaggagcgagtgcgatgttaacggtcgaaaatacattagaatggttggcactttttaaccaagccattcaaactaatcaagcacaactgagtgcgttagacacgccgattggtgatggtgatcacgggcataatatggcacggggaatgaccgccgtgactgaagttttggcggataaggccccaactgatgtgccggcgattttgaaattgacggccatgaatttaattaccaaagtcggcggagctgccggtcccctgtacggtaccgcttttttagagatggccaaaaagagtgctgaaaccctcgaaatagccccactactaagcgctggtctggcgggagttgaaaaacgcggccatgcaacagttggtgaaaagacgttgattgatgtctggcaaccagtgattgcacaattagaacaaggccctttaacggctgaagcggtaaccactgcggttgaagcaactgcggccttacgagcgactaagggccgggcgtcatatttgggtgaacggtcaattggccatgtggatccaggcgcagcttcaagtggttatttgttcacgacaatgttggaagcggggattaatcatgactgatcaatcaattggtgttttaatcgtatcgcacgtgccagaaattgcagcgggtttagaacggttaatccgagaagttgcggccgatgtcccgttgacaatcgctggtgggaccgatgataacggcgttggaacgagtctgactaagattcaagccgcgattgaggccaaccaagccgatcaattattggcgttctacgatttagggagcgccaaacttaatttagaattagcgcaagaatttagtgataaaacgattcatctatacgatgtggctttgattgaaggcgcgtatacggcgagcgcattgttgcaggccgatgcatcattagacatgattgaaccacagttagctgatctaaagattaaataaaaaaacagcgaagtggcggcggccaatttcgctgtttttttaatacggaaaggattttcaacatgaaacacattgtcaatcaggtcgatcatttgatcactgaagcgattgctggacaagcacttgcgtatcctcagctgattcaagtgccacagacctttggtttttatcaaccaagcgaagcaccacctaaaattgccgtgattagtggcggtggaagtggccacgaaccggccgatttagggtatgtcgggactgggatgttgacggccgcggtgatgggccctttgtggacgcctcccactgctgaagcaatcgttacaacggtgaaagccattgttaaaacacggcaggtgttgctgattgttaaaaatttctcggcggatcgccaagtttttacaaccgcgcaacagcagttggttcaacaagactatcaggttgaacaggtcgtggtgaccgatgatatttcagttaatccacaagactaccaattacgtgaacgaggtgtcgcggggacagtccttttacaaaagattctcggttactacgcgcaacaaaacgttgatttggtccaattagttgaaattggtcagtcggttaatcgacagttaaagactttaggcgttgccttagccgcaccaacgttacctgggcatcttgaagcgcagtttgagctccaagccgatcaggttgactatggtatcggaattcatggtgaaccgggttatcgaagagaacccgtccaatcggcggaactattggctaacgaattattaaacaaactattacatcaatattcagtacgcccacaacgggtcgcggtcttgattaacggtctgggggccacgccgttattggaactctatgtgattgcgcaagatgtcgaacagctattgcgtttacaacaaattgaagtcgcttttgtgaaagtcggcaatcaaatgacggcctacaatacgcaaggggtgtcagttagtttgctagctttagtgtctgatgagtggttaacggcattgcaagcaccgacaaccgcagcagcttggtagattactgaagatggccagttcgcaataataagccgtttaaagtgtcggttaaggtcatttttaaagcggtcgtgacttgttcaacagaaccaggatgccgttcctgaagccaaccagttgtgtaggtgaccagggcaccggaaagataatttaaaaggaatttttggtagttagcggataacgtgatgccttgattggtaatcatgttcttgataattgtgttgaccagttggcgtacgtgttggaggagatgtgattcaaatgaattttggccctcgattgataaggcattttggtaaaattggcggttatcatcaaaatattggaaaagttgttccaatattaacgtccaatgggtataactgagattgtcatcaacgtattcgccaacctcttgatcataaatccacgcgagtaaggcgtatttatcggggaagtattcataaaaagtttggcggcgaatcgccgcatgggtcataattgtggtgacactaattttagtcagcggcatttccagcatcagacttttgaaggacgcggcaatttttttctgagtaatataagacattggtccacctcatttattgatggcttcaatatagcatcgttaataggttaaagtaaaatgaaaattattgaggcattaaaaagagcgtcatatgacatttttcagtcatgcgacgctctttttaatgtctcaaagcctaatcaactcgagtgagcactcattttcaaaacgtgttcctgagccagctttttccgtctagctacatatagcaaatcatgacaaaaatcgtcacaatccgctatattaggctatactcaaaagctgaccagctcagtcacactcttaatgaataaccaccttcgtattcactgggatgttggtgtagaaccattgggcgtccgctactgataggcgaatgcagccgtgtgaatttgatgttttgcctaattcttcagcttcactaggaatgaaattacctgcttgatcggtggggacgctgtggaagaggtagatgccgtgatctaagaaagaacgccaatatttagcgccttcgcccgaattggcattatagaaagactcgccgtgttcaggttcaatgtaaaaagtaccggcgggggttggcgattctttagagccggttgaagcgtacatcgtatataaaatcgttttgccgttcattaaatagacgcgttgtttcgttaatgaaacatcaatccaaaaatcagtatatttctgcggatcaggataggcctttttttcagaagcggattgccagttgaccttaagtgcgggggtcttttttttcttggttgttaacttagtcggtgcctttgttttttgagtagttattttggccgattgagatttagcgggggttgtttgagattgttgaataccgaagccaacgccaatcaataccaaaaggccaagtaacccgatgattaataaaattaaggttcgagttggtaatttacgcatagcgttcctccgaaataattaaagtcatcttattatacttgagaaaggatggaacttcaatttaagatagcttgcccaaagtctttttttaggctaaaatagaccagtaatgacgaatattaggagcttaaaatggtaaataaaaatgcgattattttagcagcgggtaaaggcactcgtatgaagtctaaattatacaaagttttacatgaagtttgtggtagaccaatggtggatcacgtcctaacacaagttgaaaaaacgcaacccaaccaaatcgtgacgattgtgggtcacggtgctgaaaaagttaaagattatttaggtgatcggtcacaatacgccttacaagccgaacaattaggcacgggacatgccgttttacaagcggaacccttattaaaagatgaagagggattaacaatcgtggtcagtggtgacacaccattgttgaccgctgaaaccttcgaaaaattatttgcgtatcaccatgataaaggggctaaggcgaccgtcttaacagcgacagcacctgatccaaccggttatggtcggattattcgcaatgatatcgggattgttgaaaagattgttgaacaaaaagataccaacgataaagaagcggccgttactgaaattaataccggcgtttattgttttgataaccaaacccttttcaaagcacttcatcaagtgacgaatcaaaatgcgcaaggtgaatattatttaacggatgtcgttgaaattttgaaaaaccaaggcgaaattgtggcggcttaccggatgcctcattttgaagaatcaatgggggtaaatgaccgcatcgcgttatcacaagcgactaaagtcatgcgtcatcggattaacacgttgcatatgcaaaatggggtcactttaattgatcctgaagcgacttatatcgaagtcggcgttgaaattggtagcgatacgattattgaaccaaacgttgtcctaaagggcaacacgaagatcggttcagattgtttcgttggcgccggttcaacaattattgattcaacgattgacgataacgttcaaatcacgagctcaacgattgagtcagcagtgatgcacacggggtcaaacattggccctaacagccacttgcggcccagtgctgaaattggtgaagaagtgcatatcggtaatttctgtgaaattaaaaatgctaaaatcggcaatcggacgaaagtcggtcatttgagttacgttggggatgcgactttaggcaccgatatcaacgttggctgtggcgtggtcttcgtcaattatgacggtgttcaaaaacatcaagcaaccgttggtaatcacgttttcatcggtagtaactcaaacgttgttgcgccggtggcgttagcggaccatacgtttgttgccgcgggctcaaccattacggacgatgttcccgaaaaagcgatggcgattgcgcgcgcacgccaaacgaataaagctgattattggcaaaaattaccagttgcaaatgatcaagactggcaataattaaaataagaccgaatgttctgtaaagaacacggtcttattttgcggttcgtggtatacttaaactattatcgggattaactgtgatggtttctcttgcatttttaatgaataacgttttctttgtggtcattcttatcttttttaggttttaatcttgatttttttgcagaaaatgcctaatatttaaacaggtacttacttacatttttggaggctgacatgtctgaacaatatttcgaccctaagttgaaaatctttgctttgaactctaataagcccttagctgagaaaatcgcagctgaagttggggttcctttagggaaatcttcggttaaaagttttagtgatggtgaaattcagattaatattgaagaaagtattcgtggcgacgaaattttcttaattcaatcaacatctgcaccagttaatgacaatctaatggaaattctcattatgattgacgcactacgccgtgcatctgctaaaacgatcaacgtcgttttaccctattatggttacgcacgacaagatcgtaaagcacgttcacgtgaaccaattacagctaagttagtggctaacatgttaaccatggctggcgctgatcggattttggcattagatttacacgctgttcaaatccaaggtttcttcgatattccagtcgatcatttaatgggtgcaccattattggccgattacttcttagataacggattagcagaaaatgccgttgttgtctcaccagatcatggtggcgtcacacgtgctcgtaaattggctgacttcttaaagacaccaattgcaattatcgacaaacgccgtccacggcccaatgtttcagaagtgatgaacattattggcaatgtgaatggtaaacgtgcaatcattatcgatgatatgattgatactgccggtacgattacattggctgctcaagcacttaaagatgctggcgcaacagaagtttatgcatgttgtacgcaccctgttttatcaggtcctgcaattcaacgaatcgaagactctgttatcaagcaaatgattgtgacagactcaatcaaccttccagaagaaaaattaatcgataagatggttcaagtttcagttggcccactaatcggtgacgctatcaaacggatccatgaaaacaaaccagttagtccgttattcgaaaaccggtttaaacgttaaaataataaataaagacaaaaaaattgaaccgaaaggtttgacctttttttgtattcatttatttaataagcacatctgtatgatacccaaaggtacggaaaggctgacatatagaataatcggtgtttttgtgagtatgacttgtcatagaatgttataaaatagccgttttttagggggataggttcgatcaagggttcaaatttgatttgtatcatacccaaaagtacggacggccgagccgatttgatcctagtagtcgacaatcgaaactgactagtttagaatataaaacagattccaaggaggtagcgggatgattgaatgcacacagtgccatattaaatatggttctaaattacgccagtgtcctggttgtggacatcaacgtgatttaatcacggacacacctaaaaaaaaaataacacgttcagcttattatcaatatataaaaagcagttggcaacacccctttaaaacgaattggcagtgggctagcgggcgattcgggtggattacgattggaaccctattactaatcaatatggcgacaatcagcctattagtggcagattgggcacaacagactgaagcaattgccggtgtttcaacatcgtacattgttttacggcagccaaccgctttattaccactcaacttacgtttttggctttaccaattagtcgtcgttgcgggcttgttagggattggctatttattaaaacggtttggtggccgacagaagacgaccattaaccgctatgtcgcggaagttgcaacctatagcggcattagtttgccggtagcgttgatcgcgttaatcatcgcgtggtttgccgggttaaacgcactgattttaatcggggtcttgtggttcatcaattacctgattttaaacatggcaatcatcgcgagcttattgcgcacccgtacgcggattgatgcgttttatctcgtgattattgatcagttgtgtgtgcatctagccatcgttttggtaatcggtcagtttgttttaaagctcattaatcaattcctttaaaaataataaggcgttatttaggccacttttgtgaaagaggactaaaatagaacttgtaatataaaaaagggaggcctttaaaatggcagtagacgtagaaaagacattagttttagatatgaaaatgtctgaggtatttgattggagtgacgacaagacaatcgtaagagatgctttgtgggatcactatatggaatcaaatggccgcaatactgaccagacggcagcaattatgaaaccatacttagatatgagcgacgctgacgttcgtgcgaaagcagaagctgaattaaaataatagagattaatcaaaaagagcccgctgataatcagcgggctctttttataagcattaaacgttatagatataatcacgggtcattggtaaatcacgggcactagcgccttttgaaacgaggaattgaatgacatcaatgttcccagattcaaaagaagcggcacaagcctgtaagtagagatcccacatacggacgaactcaagactggtctgtgcttggatttcagtgcggtgtgcattaaaattcgcatcccagatttcaagtgtcttttggtaatggcgtcgtaaaggttccatatcagcgatttggagaccggcgttgatcatgtgttgcgtattctcaactaaaccggggacgtaaccaccggggaagatgtacttattgatccaggcgtttttagcgccaccttgttggcgggtaatgccgtggattaaagcgacaccgtcgtcagttaggtaatcagcgacgtcttggaaatattcgccgagattttcttggccgacgtgttcgaacatcccaacactggtaatgtaatcgaatggggcgtgttttaattcacgataatcgatcaattggacttcagcgacatcgctaaggccttcatcaacaatgcgtttagcgataaaatcgtattgttcttggctcaacgtaataccaacgactcttagatggtattccttagccgccgttaacatcagcgtgccccaaccgcaaccgatatctaaaaatgtccgaccgggttgtggattgagtttacgcaaaatatggtgaaccttattcagttgcgcagtttccaaactatcattcttattttcaaaataggcacatgaataagtcatgctttgatcgagccatagttggtagaaatcattgcctaaatcataatgactttggatatctttcttgctggctttttctgaatgggattgtttaggtaagaagtgaatatagttgcgattacgcataaagctgtcagcgctattgtaagccgctgtcatcaattcttgtaaaggtgcagcattcttcccagtaacctccagttcaccagccatataggcctcaccgagtgcgagtgaagcgttgcttgataattgtttgatgggaattgcttttttaaaagtaattgctatttcaggctccccagaaccatatgtttcagttgtaccgtcccaatagttaacgataattgggaaagtaaaggagtgttgtagtagtttcttataaaaagttttttctaacatgccgaaaatcctttctagtttaaaaatttaaaataccaaacaagtatacgactatttaataaataatgtaagtaaaagtcgttaggtaccgtagctttaaatactcaaaaccacaaaagtgttgtagaatagatggattgagtatgtaattgggcataggaggaaagtgtgtgactttatatcaaaaatttatcgcgaatcaacagttgcgaaaaaccaccgtcttattaattctgatcgggttaatctacgtggcgcgaccaatgatgaatattattttattaacctttatctttacgtttttagtgacgcaattagtgcgtaaaattcaaacttatatcaaaataccatcggcagcggtggtcgtaccgctctacatcttaattatttttttagtttacttggccgtcacgatttatgtgccccaaattgcgaaacaaacgattaaactgggtgagagtgtctataagttctaccaaagtccgtcgtttgatgcgaataagttcatgcaaatcatcagtgattacatgaaacaattcaatttaaccgaacagttgaaaaatggtgtgacgacgattgtcaattacatcaccggcattgggacgatgggtgtgacgattgtcctatcattcatcttaagtttcttctacacgattgaattgaaccaactgagtcaattcggtcaactctttttgaagagtacttacggttggttcttccaagatatttattatttcgctaaaaaattcgtcaacacgtttggcgttgtaattgaagcgcaactcttcattgcggtggtcaatacggttctgacaacaatcacgttaaccattatgaaaatgccgaatgtgccaagtttggcgattatgatcttcttattgtcgatgattccggtcgccggtgtgattatttcgtgtgtaccgctgtgtatcatcgccttttcagtcggtgggattcaatttgtcgcgtatatcttaatgatgattgtcgcgattcacacgttggaaacttacgtcttgaatccacggtttatgtcgagtaagactcaattaccaatcttcttcacgtttgtgatcttgtttgcggctgaacggttcttagggacgtggggcttaatcgtcggaattccaatatttacgttcttcttagatattctaggggttaaaacgattggcaagcaaaaccaaccgactgacattaaagttgaatagtaacaattaaaaatcggttaaacgctgcttatgcttgcgtttaaccgatttttttgggtgctgattggcgatggctatccgcgacggtggttgccagttgattcaagtcgatgtgtagttcggtcgccacgataaagagtgtttttaatgctggagcggcgcctttttcccagcgataaatcatcgagctgctgactttaatctgatagtttgcggttaaatggtcggcgagttgttgcatcgttaagtttagcgcaagccgtttgtcgtgtaataattggccaaacattaaattcaccttcttctagaattaaaaataattagataacattaattatatgacaaaatacgtcaaaaagttatcattttcctataaaaagtcgaattgacaagtttatggagatgacgtaacattcctaatgtggaacaaaatgcattagtattcttttgggggtgccaactttggcagagaagttatttgttttatcaggttatttgaagagtcatgatttaaaacaacaagtcgtcgccgatgtgctagggaagacgttaacgacagctaatcggaagattcgtggtaagattccgtttacggtgaaagaaattcagtcgttacatgatgaacttgatattccaatctcagttttttttgataaataagcaaaaaggtcaattcgcaattcggattggccttttgtgttgtataatgattatccaatctaaattgaaatgaggtcgttaagatgccccaaatttattttttatgtactggtaattcctgtcggagccagatggcggaagggtttggtaaaaccttactgggccctgattggcaagtggcgagtgccggaattgaaacgcacggcttaaacccgattgccgttcaggtgatggctgaaaaagacattgatatttcaaagcagcaatcgcagttaatcgacaacgattatttacaaagttgtgatttagtcgtgacgttatgtggtgatgcgcgggataagtgtccgatgacgccccctcatgtccaacggattcattggccgttgccggatccagccgcttttgacggggatgatgaggctaaattaaaccaatttagaagtgtgcgcgaccaaattgaaacagcaatcagtcatttaagcaaacaaaaagacggccaataaggtcgcctttttgtttgctaacgtgcttttgagtgatagcaactcaaaagcacttatttatttttcaataattctaatttaccgttaacgatcatttcgcagaggtcggggtaactaatcccaacaacttcggcttcttgcggaattaatgataagggggtcataccaggtaacgtgttaccttcgatgacgaacaacccattttcaggactccagaagaaatcaatccgtgcgtaatttgtgaggccaagtgcttgcatcgcatctagcgccatttgtttcatcgcatcgtggacatcatccggtaaatcgttcggtggtgtgatgaattgtgttgtgttacctgtcacgaatttatgttcaaagtcgtaccaaccgtcgttaacgacgatttcgatggcgggtaatggttggccattaatgacgcccaatgagaattcgcgacctttaatgaattcttcaattaaagcagtcgtgtcaaaacggagtgcatcttcaacggctggttttaattcgccttcattgtggacgatgtgtgtgccgacacttgacccaccgttactaggtttgacgacaacggggtattcaaatgggaccgctggaatcacttggttccggtaagcggctacgaaacgggccgttggaatttgattataaagtaaaatttcttttgaaacttttttgtccattgtgacaccagcggctaatgtatcgctaccggtataaggaataccaaagagattgaggaccgcttgaaccttaccatcttcaccatcgccaccatgcaatgcgagaaaaacgatatcagcagttttacaaatttctaagacattggggccgaacaattgcgtcgtgccatccgtgcgtaacttgttgatgtcgtcgtccgttaaaacggcatcgctgatgtcatagtccttttcgatgggatctgatgaatacaaatcgtcgattgaatcaacggcttgcaaatcgtcacctaagaaaagatcgacaaaagcaacatcgtggcctttcgtttgtaatgcgtgcgtaattttatggcctgacgttagtgaaacgttgcgttcagtactgcgaccgcccgctaaaacaacaattttcatatgagtctacctccgaatatttttggaaccttaagtatagcatacatgcgattagtggggtatcaaaatgagttggatgggcacaaaaaaacgcaaaattagcactcgaatatcaagagtgctaatttcttgaattttcagaaatacgccttataatagacttgtaatcaaataaagaaaggaagttttagagatggcaaacgaattaatggatcgtcgtcaagattggctagatagtttagttggggatgactttttcaagaactttggtaaacaattctttgcaatgtcgcctgaaactgacaacatgatgcagaccgacgtcaaagaaacagatcaagcttaccaattgactgttgatttaccggggttagagaagaaagatattcatatcgattatcaaaatgagacgttgaagattagtgcgaaacgggatagttttgatgatcatagtgatgcggatggcaatgtcgtccaaagtgaacggcattacggccgtttcagtcggcagttctatttaccagcagttgatcgcaccaagattagtgcgaaatacgacaatggtgttttaaacttagaattgccaaagcaagctgaacaatcaaccgcggctaatcgaattgaaattcaatagttaatcaaataaaagacgggtttatgccagtaatttggcataaacctgtcctttttaatgctgttcttcggtatcttgcgcacgaaacatttggttgtatcgttcttcatcttcttgattatcacggacgactttggataacgtaaatgatgacgaaatgagtccaacagcgcccattaaataataacctttgaccattagcggttcttttagggtgtaaagcccgattaaaattagacaagcgaaaaataaaaatgatccccaagctaataaaacaaaagcgggtgtattacgataggccttcttcttaatgttattcataaaatcctccaaattaaagttaataccactcagtaaattagcaaagcaactcattactgtcaatcgacattaaatgatgtataaggtctttgacaacaacgattaacggttgataagggtgtgattttcccgggaaatattgtatagttaatgtgattaagatattagggggtagggacagtgctgacactttcacatttatcaaaaagttttggggcaatgaaggcggtcgatgacgtttcatttacggttcaaccgggtgaaattttaggattaatcggtcaaaatggggccggcaaaacgacgactttcaggatgattttgaattttatgacacccgatcaagggacaattttgtggaaaggccacgcgttcactagtcgcgattacgatcaattgggttatttacccgaagaacggggcttatatcctaagatgacggttgaacaacaaattttatatttcgcgcaactacggggctgtaaagcggccgacgttaaaccgcggattgatgactggttggcgcggtttgccgttaagggcaaacggaccgataaaattaaagatctatcaaaaggcaatcaacaaaaagtgcagttgattgcgactttaattcatgaaccagccctaatcattttagacgaaccgtttagtggtctcgatccggtcaacgccggtttattggaagacggcattgaatggttgaaagctaaaggcgctgcgattattttttcgagtcatgatatgaccaacgtcgctaaaattagtgatcggattgtgatgctccgtcaaggccagattgcgctcgccggaacggtcgatgagattcggcaacaatttggccggacgaagttgtttttggaatcgccactgacgcagacggcgctcgaagcattacccggcgtttcacgtgtaacaccgcatggtcaacaacttgaaatcacactcaccgatgaagcggtcggcccacaaatctttgaactagcgactaaggccggttatattccagaatttagtcaacaggcccctagtttagatgaaatcttcagaataaaggtggcggaaaccaatgactaaatttaaggtgatcttcaaacaggtttttatgaagaatattaaaagtccggcctatttaacgatgattttaatgcctgttttgttgttaggcgtggtgtttgggattgggaaaatcattgatcagtcacaaactgcggctaaaattgcggtagtcggccaagcgcctgaaagtgcggcgattcggcaacttaaagggaccgactatacagttaaaccagcgattacgacggttaaacaagctaaacaggcgttagaaaaagaacaaatcgatggctacttaacggtcaatcaacaggcccaaataacttattatcaacaacaagcgagccatgattttgatcccagtacgttgcagaatcaaatcaatcaattacagttagtcacattggcagaagcggccaatgtacccactgcccaaatcaagcagttgatgacgccgactacggtgaaaacggtcactgtttcggttgaggacggtcaacaaaaaatagctcagagtcagaatcaagatgtcactcaaatgatttcattagggattacagtcttaatgtttgtcttcatcgtcaattatgcggggataattgcccaggaaatagcgaccgaaaaaggctcgcgcattatggaaatcattctatcgagtgtctccgcaacgacccaattttttgcgaaggttggcgcgattttggcgctggttttaacccaaatcggtgtctatctggtaattggtctggtcggttatcaatttttaaaacagcaagtcgcgttgaggagtatcttaaaacaagtgacggccgtcatttggacgccaccgatttggtatgcgattgcctttttagtggtcggggtcctactctataccattattgcagccatgctcggttcggtggtttcacggatggatcaagttcaacaagcaatttcgccgttgattattatgggcaccctcagctacatgggcggctttgtgttgatgtcacacgcggatattccaatcctaaaaatcctaagttatgtgccgttattctcacaaatcatgttaccggttcgtttcgcgaatggcgatatcagcgcaatggccgctggtctgggtttagggttagcgattgtcgccttagtcgggctgacctacctagcgctgattatttaccggatgaatgtattggtttattcggatagcggggtgctgaagtcgtttatgcgctcgtttacgttattgaaagcggaacagaaataaggaccgttctggtggcttagaagacaaacttaatggtagactagggatagattctgtttgaggaggttcttttatgacgaagatacggatgcaagatgatttctatggtgccgtgaatgctgagtggctgacgcaagctaagattccggccgataaaccagcgacgggtggttttgtcgcgttagtcgatgaaatcgacgatcagttaatgcaagattttgaaacattgaaaccagttgatcaacctttattacaagcctttatggattattacgccttagcggccgattttaaaacccgtgatcaactaggcgtcaacccgattttaccgttagtcgctcgcgtgcaatcgttgagcaatttagccgattataatcaaggtttggcggactgggtcttatcggggttaccaacaccgtttaatttatcggttgatccagatatgaaacaaacccaacaaaatgcgttatacattgaagccgcggatttaattttaccggataaaacgtattatgaagcaggcaatgagagtgctgaccaactattagccgtctttacggatatgatggtccaactcctgcagaaaattggtttagcgccaattgatgcgactaagaccgttaaacaggctttagtcttcgatcgctcactagcgccttacgtcaaaagtgccgaagaagcagccgattatacgaaactttacaatccgcgtgatttagcaccgtttttgacgcaacaaacaacacttgagtttaaaacactattccaaaaagtattgcctaaacaaccgacgcaaattatcgtgacggaacccgcctattttgaccaattaactcaattggtgacaacggcgaactttgccgattttaaagcctggttattagtgatgacggttcgcggttggagtggctatttgaatgaagaaatgcgtcagattagttcgatttatagccgcgctttgtctgggagtaaagaagcccgtccgcaagccaagagtgcgtattatttggcactagggatgtttaaccaagtggtcggcgactattatggtcggcgttattttggtgaatcggccaaaaaagatgtcgaacaaatggttaaaaagatgattggtgtgtatcagaaacgtctcgaaaataacgattggttaagcgcagaaacgcgcgaaaaagcgattgttaaactcaatcatttagggattcatgtgggctatcctgagaaaatcgctccaatttttgcaaaattaagaacggtaccggctgttgatggtgggacgctatttgaaaatacggccgactttattcggaccgttgaaactgagaattttgcccaattgacggaacccgtcgatcgcgctaaatgggaaatgggtgcggccacggtcaacgcctattattcaccttctaaaaatgtgattgttttccccgcagcaattctacaagcgccattttatagtttggcacaaagtagtagtgcgaattacggtgggattggggccgtgattgcccatgaaatttcacacgcgtttgataataacggtgcgcaatttgatgaatatggtaatttaaataattggtggcaaaccagtgatttagaccattttaaggcgttggcgcagactatgattgaccaatttgacggtcgccaattggctggcaacgcggtcaacggcaagttaacggtttcggaaaacatcgccgatgccggtggcttgagttgtgcgctagaggcggcgaaatccgcagacgatgtcgatttagcagccttctttactaattgggcgacgatttggcggatgaaagcgacggttcaatatcaacaattgttgttgaatgttgacgtccatgcgccaaacgctttgcgtgccaatgtccaagtccaaaacttggctgatttttatacgacctttgaaattcaaccgactgatgggatgtatttagcaccagaacaacgtgttgcgatttggtaagataaaaagggtgccacgtcaaattaaattgatgtggcacccttttttaggagactggaggaaataagatgactgaaaaagaacgtatgattaatggccaactgtatcgggccaatgatgaccaactacgcgccgatatgaagcgcgctcgggtgttgacccggttgtttaaccaaacgactgaagaacagcagacctatcgccgggaattgacgcaggaattattcgctaaaagcggcgcagatttatacattgaaccgccttttcggacggattacggctgtcaaacaacgattggcgaacatgtttatatgaactatgattgcatcattatcgatgtggcacctgtcacaatcggcaatcatgttttcttcggcccgcgggttagtttgtatacggccggtcatccgattacggcgcaagaacggcgcgatgatttagaatacggacacgaaattacgattggggatgacgtctggattggtggcaacacagtggttaatccgggggtcacgatcggcagtaacgtggtcattggttccggttcaatcgtcacgaaagacattccggataatgtgattgcggttggtaatccgtgtcgggtgctccgtccgattacatcagacgatcacgcttattgggcgcaagaaaaggcagcgtatttcgctgctacggctgagccgactgatgaatcgtccgagtaacataactgcttacaaaaagcgcaccgatgatacagagcatcaatagtgtcgtggtgcccaacggaaaatcaaagcgttgtaacccgtagtagccaacggtccccattagccaacagctgaaattaagccattttggcaatcgacgataaagtagattgaagaaaacgactgtgtacagtggcgtgaaagtggcgctgattaaactgagaaatagctcatatttaaataactgggtactacttgctaagcctagtccaagtaatgtgacgccaatcccgagtgtgttgggggtgagtcgccaatttgggaatatatttttaagattgataccggcggaataagcgtccaaaaaggtggttgtaatggtggaaaaaagaatgatgaacagcacgattacaccgtaatgggtggccgctagaaattgattgaaatcggtatagccggttaaaattacagttaaaaaacctaagaaaaacatgcctagactgccgaaaaagtagccgctagtactccataaagagagtgttaggggcttttttgaatgttgcgtataatcggcaatcaacggtaaccacgatagtgccatcgcaatactgagttcaacggcggcgccaaagctaatgtgttgcgtaacaagttgttgtgggttgtgggggaggacacctagttgccaaaaaagtccggcgcaagcgaccactaatagaagaacgattaggttatttaatcggaaaaacacctgggttttgagggctaaccaaccaatgatcaggccggcaataattaagaggtcaagcaaataactcgtttttagtagctttaattgttgcaatgattgggcggcgttagcaatcattacaccggtccagccaatcaattgaacgacatttagaatggaaaataataaaacgccagtagcgccatagacgggccgggttagttcaatcgcattttgttgacgttggcccccgatgaagcttgctggcagtaacaataaaaaggcaccaattaaatggccgataataatcgctaaactacctttgaacaagcctaacggtgcgattaaggtgccggtgatgatttcggcaatcgaaatcgcggcaccaaaccatagtaaaaattgattacgattgattttcataatgaagcctcgccagtgtgccacggttgttttaacgcttgaacggtttgagcaatatctgaactctgggtaatcaccgaaatgacggcggctccagcaacgccggtttgggcgacattggcaatattttgtagtgaaatgccaccgattgcaacgacgggtcgttcgctgagggagacaaaatcgcctaattgttgtaagccaagtggtgattgcgcgtcagatttagaatgggtggggaaaatggggccaatgcctaaataatctaaaatcggttgttgatgacagactatgatttcggcggcgctatgacaagataaaccggtgattaaaccgtggcgtttggcggtttcgattttagcccacggttgatcggattgacctacatgcaagccgtcagcttggagtgttaaggccagttctaatcgatcatcaatgaaaaaagggacttggtaagtccgacaaagttgctgagcttggcgggcataatgttcaatctcagctgctgattgcagactattcggacctttttcgcggaattgaaaacaagtaatgccagcgttaagtgccgcttctaatgtcggtaagaattgggcgacgccggtatcctgggtgccagtcactaaataggtttggagtatttccggggaaatattagtcatgttcaacctcccgatacgcccagtgattggtcggaccatggccgtgaccgacggcaatcggattggcaattgccgcttgaatataggctttactaatccgaatcgcttgttttaagggcgtgcctttggcaagttccgccgtgatgcaagctgaaatcgtatcaccggtcccgtgcgttcggaccgtttcaatccggggtgtcgacagccattcatcactgccatccgcgtataaaatataatcgttggcttgttgttccgccgtttggtggccacctttgatgatgatgttttgcgcgcccattttttgtaagatttgagcggctaacttgaactcagctggcgttttaacggattgaccaatcaagacttcggcttcgggtaagttgggcgtcaggacggttgcgaggggcaataattcgttgcgtaaagtcgtgattgcatcctcggttaaaagtgcggccccacccttagcaatcatgacggggtctaacgtcagcgggccaaagtcaaagcgccgtaaattttcggctacagccgccacgtgtgcggcatcggctaacataccggttttacaggctttaatgtggaagtcggctgccaacgattcaaattgtttagtaatcaattcaaggggtaacgggaaactgtcttgcaccccgagtgtattttgagcggtaatcgcgacgaccacgttggtggcaaaaacgtggcgttcctgcatcgttttaatgtcagcttgcatgccagcaccgccaccactatcggaaccagcaatcgttaaggcttgtgggaagtcgttcatcttaattggactcctttaattgggctttttgactgatttcttcggtcgtcaccgtgaacaaacggtctaataattgcggataaaagctaccaggtaacggttgtggcatcgcttcagcgactaattgacccgtgacggcaaaagtggtggctgcggcaacggctgcttgataaggatcgtcaggtagcatgccgacgaacgcaccgcaaacgccggttaacatatcaccagagccgacgtgggtttggaaaagcggggtcccgttgaagatttgggtaacacgcgtgccatcggtgaccacgtctgttggacccgttaatagaatcgtagtgttcagtttacgagcggcttgttgtgctaaatcaacgatgtcggcttgaccactaccggcatcaatcccgttagcttgccagtcaattccagcaaaataggcaatctcaccggcatttccgcgaataatatcgggggtgcctaaagtgagtagttgatcgatcaccccttgacgatacgttaaggaaccgacggcgaccgggtctaagacaaccggtttgtgcatttgatacgcggcttgcagcaacgtgaccatctgatcaatctggggttgggcgagcgtaccgatgttaacggtaatcgcttgggcaattgcaacgatatcggccgcttcttcaggtgcactggacataatgggcgacgcgccaatcacattttggacgttggcgacttggtcgacggtcacgtggttcgagatgttggccacaattggattcgtgtgccgcagttggttcaataaggtctgattcatggtagagcctccttagaatatcaaaaaagccacttttggctgcacgacggcatagaaaagtggcttaacaaataagcaagggagcactttcctacgcaagtctgaacttacaggttcgaagggattagattgaatcaatctatctcagttcttctaaagaacacccctagtgcaaagcgatttaattgtacccttagtatacgggatgccgtcgtttttgcaaccgttttataattattgaaaacaatttatttaaagaacctttttttcattaggtatagaccgatgtttttttaaattaagaaaccgctttaaacgccgtctataaaggtctataccaaaatttaagcgcttgcttatggctaaatgtaatggtttaatgaaaacattgaaaaataaaggagtattcgcaatgaaaaattacttacaacgaatgggtcgctcattgatgttaccagttgccgtattaccagcagctgccatcttaatggggattgctaactgggttggcaatggcgattcaaatgctaacatcttcacgattttcttagccggtggtagtggcgcgattttaaataatttaccattactatttgccgtcggtttagctttaggaatgtcgaaggatcaagacggggccgcagccttagctgggttggtggctttcttagtaccgaagaccatcttagcacctgcttcagttcaagcgatgcaagggttatcagacatcgctaaagtcaatcctgcttttggtaagattgaagggaacgtcttaattgggattttggccggtttaattgccgctgccatgtacaacaaattccataacgtgaagttaccgatggcgctgtccttctttagtgggaaacggttggtaccgattatggccgccgctgccatggtcgttgtttcagccatcctatactttgtttggccagcagtcttcaccgtattagtggcctttggtaaagcaatttctaatcttggttgggccggggctgggatttacgggttcttcaaccgtttattgattccaaccgggttacaccatgcgttgaattcagtgttctggtttgacgttgcgaatattaatgatatcgggaatttcttaggcggtgctaaatcgatcgctaacgggactgccattgttggtaagacaggtatgtatcaagctggtttcttcccagttatgatgtttgggttaccagctggggcctatgcgatttataaaaatgcgcgtcctgaacgtaaaaaagcaacagcttcattaatgttagctgctggttttgcctcattctttacaggggtaactgaaccccttgaattctcattcatgtttgtggcatggccactctatgttttacacgctgcctttactggtatttcattggcaatcgccgcattcttccactggacagccggatttgcctttagtgctggtttagtcgattatgttttaagtttaaagaatccagttgcaaaccaaccattgatgttattggttgaagggctcgctatggccgctatttattacttcggctttaactttgccattaagaaatttaatttgatgacaccagggcgtgaagttgaagaggttgttgacgatgcaccatccgttgcaactgatgaaaatgatgataaattcatgattcaagctaaaaagatttacgctgccatcggtggtaaagccaatatcaaagtgattgataattgtaccacgcgtctccgccttcaattagaagatacgggtaaagcgaaccaagcggccattaaagcggctggtgttgctgggattaacgtcttagatcagacaaatattcaaattattatcgggactgaagtgcaattcgtcgcggatgctttgaaagaacttttcaacagtaatgcaccaattggcactgttactgatgacgcacccgttgccgaagcagcagtcgttaatagtgatattaatgctgggatgacggatgaattctacacagttgctgatggtcaattaattgatattgaagcggttgatgatgcaacttttgctcaaaaaatgttgggtgacggttacgccgttatcccaactgacggtaaaatcgtgtcacctgtttctgggacaatcatgacggtcttcccaacgaaacacgcaatcggcatcaagactgaagacggtttagaagtcctagtacacatggggattgatactgttgaattaaagggtgctccttttgaagtagccgttgaagaaggtcaaacagtgcaacacggtgatttattagccaacgttgatttggcacaaattgtgcaagcgggcaaacaaaccgcgatgatggtgatcatcactaacatggcagacgtggcttatttcaaatcaaccgcaaccggccgcacagtccaatcaaacgaaatcgcattaaaagcaacaacgaaataaagagtgctgactgagccgggtaacttctgagtatagcctagaatagtggattatgacggttttagtcatgattcactattcgtcgctagacggaagaagttggctcagaagcacgtttaaaatcggagtgctgactcaagtcggtcaggctttgaggaataacctaaaaacaggaattatgagtatttttcaactcatgattcctgttttgtcgctaagcacaagaaactgtgagtggaagcacgtttcaaatccaaaaaaagtggttatcctcagttcgggataaccacttttttaaacttgatactcaattgataaccgagttctttcacagcttattattttaaattgtcgcgtacatgtctttaatcttcttgatggaggtggtcatcaattcagtttcactagctgttaattgaagttgataatccttgagaatcccatctgaaccgaccattgcgggatggcctaaataacaacccgcttgttgatcgtagttgctgacgggtagaatctcatgtgtattttgtaaaatcgcattggcacagatggccgcttggttggcaatgccgtaagaggtgtaacctttgccactaatcacggcccaggccccttgacgcgcatcagtttcgaattgcgccagttgttcaggggtgaattgcttagtgagtgcttggctagcgacttgaacacttgaccaggcaacgaattgcgaattaccatgttcgcccagcacgtagcctgtgacggcgtttggtgcaatttgtaaagcatcggcgacggcgttttgcatccgggcagtgtctaaggttgtcccagtgcctaaaacgcgtgcttgtggtaagccggttaatttttggagatattgggtaatcacgtcgcaagggttggtaatgcttaataaaattcccttaaaattcgcggctttaatcttgggcccccattgtgcggcgacctgtttggtataagctaattcggcgaagcgatccgaactatgttggagaattgagatatcaccagccgagaagatgattaaatcacaatcactcagttggctttcatcgttagctgtgatggtgacatcaccaccatgcccgacttgtccggtttttaaatcgtgcatttcagcgattgccaaagcttcgttttcatcgagtaagacgagttcatcacaaactcggcgagaaactaaggtataagcgacggtgctcccgacatgtccaattccgataacggctacttttttcataaaaaacactccttattaactagttgttgacgctttcattttagtggatttaagccggttaaacaacctttgatgagaaatacgtgtgaattcaatgggttgctggccaccgattgatccaaagcactaaaaaagtcattaaccgaccgagttaatgactttttgaaatttagttaaagagacctttgaagaagctagcgatactatcgaatagtttttgaataaaattgcgattactttcggtgttgagcttattaaagatatttttagcaccactttgaatattattcatcaatttaccggcctgatttttaaaatcatccgactttagagcaccggaatcctgaactttaacgagtagattgataatttgtgttttctgattattattgatgatcgtcgttaggttatttgtctctaactgattattgacgattgtggtgatttggttgacggttaaattgtcccctttttcagccatatcctgtttagcaccggtgacagcgttgttcaattgcgcatcactgtaacccgatgtgtctttgttggcttgggtaatgtcactcaacgtgctcatttcctcttgagcggcagtcacctgggcttgatttaacgtttcactattctcagcaaaagccgcgtagacaccagccagtgcgccggaaccgtcaattgggactgcggaagtcacgtagattgtggcgttggtcacgccggcagtcaatgcggcatttttatattgatcagcggtaatcgtggtgatgttgttgctgccgttaaaatcaacgattttgacgttaattccggtggccgtgtcatttttttgaatcagggcgctagaatagacactcgaattagcgttaaaggtctgttgattttgatctaaatatttaacgagggtcgaaccagtgacggttaattcattgtagtcggtcacgttagcggcgttttttaggacggttaatgttgcgtctttttgagtgctggaaaggctagtcccgagcgtggcaacgggtttatcccagctggtcgtatcagcggcaaaagccgattgtaccgagaagccaataatagttgcgagaatcagtggaatggccactttaagtttagtgagcatagtgagtaatcctttctggatgcgtttaatacctttattaattaccttctattaaatcaatctgatgtttaattctaaaaagtgttgcttttgaagtgttgaaagcatctgtttttttacctattttcacactattttcaatcattaaagcgaattcattacgagtctctagtaagtaatagcatgttttattaacagatgcaagtacttagtctccatcaaaaaaaacgacatcagaaatctgattgtcgtttaatcgtgatttattttaattattgtacaatcgtaattgcgacgctccgacgaccccaactaacacattggccgaccgttggaaaatgaacatcgataatgtgacctttaatcgcaccaccggtatcacccgcaatggcatacccataacctggcaccattaccaatgatcctaacggaatgacacttgggtcaaccgcaatacagttcgggttcttcattaaatcaatcccagttgcgccgtaacgacccatacccggcgttgcaattgaataggcagttgcttggacctgaattgtttgaccggccttaccgctcgctttatcggctaaactagcctgttgcttagcggcagtatcgctactacttgtatccgtcaccttagcaacggtcgtagcggctttggcttgttcagcagccttagcagctgctgcctgttctgccgcaattttagcttcttcagtgctcttttcttgcgcaatcttagctaatttatctcgactttgacttaagttagtcttcatctgatcaatttgcgtttgcaatgtcgttgtctgttggtctaattcgattttttcttgatctaaattagttttactcgtttctaaacgttcttgaaccactttcgtatcatgatagctttggactaattcatccatattttgattatcagccgattgaagtaccgttaatgcatacgcccggttgaagaaatcgctcaacgaatcagctgataacaacgcgttaacgacgttgcgatcgtcagcactttgttgcaacgattgtaaccgttctttagcataagtttcacgtttcgctaataagaccgcttgctttttcaaaacctttttagcattcgtaatgctagcttcattatcagcaattttagtttttaattgatcgactttttgatattgtgcattaacactcgttaacgtcacctgaatctttgaatttgtttctgaaatatctttttgtgtactgctttcttgatcttttaattcactcaagctggcagcactaacagatgttaccatcgttaccattgcaactaatcctgtgacaacaatcaacgctagtcttttaaatcgcatcttgttaaactcctccattcataacccagagtcgattatacccaagaagtggccctattagattgcagatttatgacgttatattacagtttaacgacatttatattttttgtgtaataaatttaaactttagccgacgctaatccggcttgataattgaccgctcaaactgttatctctaaaaacaaccaatccttctgtgcagttgaacaaaaaatctcgtcaacctaggagtcaggttaaacgagattttaatgaattgatcatcgattttttaacactctggccatttcacgatcttgttctttgcgttttaatgtttcgcgtttgtcatattcatgtttcccttgaccaacaccaattaacaccttcgcaaaaccatgttttaaatagacctttaacgggacaatcgtgatacctttattcttagtaatgcccactaatttatcaatctctttacggtgcaataacaacttacgattccgtagtggatcatgattaaattggttgccctgttcgtaggggctaatatggacgttttctaaataagcttcaccattgcggacccgggcaaatccatcccgtaaattaattttacctttacgaaccgatttaatctcggtcccagtcaacactaatccggcttcaaatgtttctaaaatgctgtaatcatgaccagcttttttattttgagcaatcaggtttgctggtttttgcggatgtttctttgccatttaatcacctactttttaaaagtacgtttttgtgaatctttggctggcgctgggcgccgaccgttattctttttattgtcaaaatgacgattgcgtttgtcgccactcttttcattatcacgtgggcgcattggccgtttaggtcttggttctattctactcaatatctcagcagaagccaagggaacgtcctcggtcttcaagagttcaaaatcaactgaatgcgcatcgaggtcaacatttgcaaccttcactcgaacgggttggccaattcgatacatcttgtgtgtccgatcgccaactaaagctaattgactctcaacaaagctgtaataatcgtctttcatctgtgaaatgtgcacaagtccttcaaccgtggttggtaaggcgatgaacatcccaaagctagtgactgaactgatgacggcatcgtattcattaccaactttatctaacataaattcagcttttttaagatcaacgacttcccgttcagtatcaattgagcgacgttcttcgattgaagtttgttcaccgattggggctagtttaggttcccacttcgccttttcttcagttgtcatgccatttttagcatattcgtgaattaaacgatgaaccattaaatcgggataacgacgaattggtgatgtgaaatgcgtgtaaaattcagccgctaaaccaaaatggcctaatgattcgtctgaataatgtgcttgttgcatacttctcaataacatcgttgtaatgatgggttgttctggttgaccttcaatttgagtcaagacttcttgtaacatcattggtgtcactttttgacttgagccttggatctgaatgccataagccgtaataaattcaaagaatttcttcatcttttcgctatctggtgtttcgtgaatccggtataagaatggcgcatgagccgtgctgtaatgttcagcaaccgtttcattggcagctaacatgaatgattcaatcatgcgttccgataacccgcgtgaacgtaattcgatgtcaatcgctttaccgttttcatcgacgataatcttagcttcgtcttcttcgaaatcaattgcaccgcgattatggcgtttcttcaataaaatttcgtgtaattcagacatatcttcaaacatcggtactaaggccgcgtattgttgacgaagatcagcatcttgatccgttaaaatatgattgacgttattgtaagtcatccgagcagttgatttaatcacacttgggaaaatgtggtgttcaacgacttgaccgtgttcgtcaatttccatttcacacgttaaagccaaacgttcaacatctggatttaaagaacagatcccatttgataaccggaaaggtaacattggaatcacacgatccgttaaataagtactcgtcccacgttctagcgcttcaacatccagtggtgagccttccgttacataatagctgacatcggcaatgtgcacgcctaaatggaaatgaccattcgctaatttacggacattaaccgcgtcatcgaaatcttttgaatcgtcgccatcaattgtcaccacgtcttggttcgttaaatctttgcgaccaactttatcggattctaaaaccgtatccggtacggattcagattgtaaccgaacttcttcagggaagtctgttttaatatcatgttgataaacaatcgataagacatcgacaccaggatcgtttttattgcctaaaacttgtttggcaatcccgcgcatttgaccgggtgcttcaacacttgggtatttcgtaatatcgacttgaaccatatcgcctttttgaggatgtaacccattgtccgttaaataaattaaataagtactcaattttttggcgtgactttgaatgtaaccaatcaaaccggttttttctttttgaatatcggaataaggcataaattcaccgacaatttcttcaatcccacgagtaatgacgttgacaatcttaccttcagggccacgacgactattttcttcggcctctttaacaatttcaacttcgacggtatcgccgttcattgcaaaattggtattcggtggcgcgataaaaatatcgggatccgtattatcaacggggagcgaaacaaacccaaaaccgcgttcgttggcgtgaaaaaccccttcaacacgtcgttgagtggctggcattctaaacttgccggcttcatccatgtttaatgttttagcggcttctaaatcggccatcactttaactaagtctttaaaatcttgtgaaccactgacaccaatccgttcactgatttctgatacgtttaattgttgcgtttcatctgcggcgaaaatggccataatggctgatttcatttgttcaacttgtgtcatatcaacacctctttcttgttttcaaagcgcttaataaacgccgttacgtctgcttctaattgatggtgcgcggtatcaaccgtaatcacgtgaccggcctcagcgtaccaatgataatcgactggactacccaggtcggtcaaccgttgttgcaattgtttagcttgattgggatcaatgacttgatcgtggcctccctgcccaataaaaacgggtttcgggccaatctgatttaaatccgtttgaactaactgaccaaactgttggatttgcgctaattgttgtggtaattgttggcgaatctgcgctaacttggccatttgtaacgcctcagtcaccgccgtcgcttgatacactttttgtgcatattgttgaaataacggggtcaaactggctggcacaccctctagaagcggcgtgctaaaaaccccaccaccaaccacttccggcagtaattcaagtgctcgcaaagcaaaaagcccgcctaacgacaacccgaaaacaaagatgggctttttgtgggccttgcttaactgctgaatcgctgtcacggttgtttgccaccaaagcgtgacgttgccgccgtttaaaatatccaacggttcaaacgtcgcgtgacccgcaaaatttggtgctaatacggaccagttttgcttttctaaaaaacgacctaacatccgaacatcattcgcactaccggtataagcatgtagtaaaacgatgccaattgagccttgttcaaaataatagggttctggtaatcgataacgcataccacggcctcctaccggcaaaattcatttaaaaaggtctcctgccattcaacaggagaccgcatcaacgttcttattagaattcgatccgcctgttaaattagtgtgatgaaagatacaccaacgctaacgcaaagacgaagaataaaatgcctaggacaactgtgactttttgcatgaaagcttcaaagccccgtgccttttgtttaccaaataaatcaccagcaccgcctgataaagcactcaaagcatcttgctgtttacttggttgcatcatgactgcaattacaatcaagattgaatcgattaataataagttcaggaaaagattttccaacctaacccctacctttctatctacactgtcttttaatactttagcataaaaagtattcagacaccacatttttatcaattatttcacgagattttcatcgatttcttgcaactgttgcgctgccaattcaatctgacgtctcaccgacgcacgtaactgatgtttggtcaaaacaactagggtatcgcccgcgcggattaaggtatccccatgcggaattaattcggtttcaccccgtcgaattgcgattaatagactggcttttggccaatctaattcgcgcacttgccgatcttctaacggtgcgccgacaaaaaccggtacttctagtcgatcactataaccttcagtttgtggcgcactcttaccaattaaccgttgcaatagtgattcataaatcggtgcaccgcccattaaatcaacgacgacgtacgcgattaacgataaaatcgccaacggcatcagatgcgttagtgaaccgaccatttcggtcaccaataagatggcggtaaacggtgcttttccgatgccggcgaaatagccacccattgaaaaaatcatcaaattaaccacgtaattcggtgccaatagccctaaatgcatcatcgttaagccgtaaacagcgccaattaaagcgcctaacgatagaatcggtaaaaatatcccacccggtaagccggaaccatacgaaatcatcgaaaaaacaaaccgaatcactaatagcgcaatcacgatttttaaactggggatctgttgccctaattgggtaatcacggtattcccgccgcccaaaatagtgggccaaaaatacccaatcgggatcactaaaatcaacggcactaatccccggtaacgttgtggtaatttaagccgcgcgtaaacttggggcatccataacaacactttttggtagagataacccgctaaacctaaaataatccctagaataatcaaatgccaatattgattaatcggcaaacttttggtgtacgcaatatgtaaaaccggtgttaagccgaaaaaatttaacgacacaaagttagccgccaacgcacttgttaaagcggtcagccaaacaagtggtgaaaaattatgatagatctcttctaaaacaaataacgtgccagcaatcggtgcattgaaagcggcggataagccagccgcggccccaccagcaatcaacaaccgccgatcagtccccttattgtgtaaggtttcagcgacgccttgtccgaccgctgcaccgagttgaatggaaggcccttcacgccctagaaacaaacctggtgctaaacttaacagcccaccgacgaattttcgccaaagaatcgaccaccatttcaaatcaaattcacccgctaattggccttcaacttgtggaatccccgaaccactgatattcggttcccgttttaataaatgggcgacgattaaaccgcacaccacgctaatcgctaacacgaccagtaagagacttggcgcctgttgtgcgcgttggtacagattaatcgaaaacgctaatcctttttcgattaatagacgaaaaagactgaccacaatccccgctagtaccccaacaactaaccctttaatgataaagaaaaaacgggtcttattgaagcggctctcacgtcgtcggttatcttgcatcgcacgcattcctccaaaaataaattaatgataggtttattataaaccatttgtccaaccgataatgattaatcgtctgaaatgcctcaattcaccatttgtctaatgaattgcttcgtgaaaattagcgcattctaatctcaacgaaaattcaatgttaaagccattaaaagtgagtgataatcacatttgtaaccgtttacactttttgaataatatgtttagataaaggtgttcttaacaattaatttctggaggaatcgacatgacaagaattgaacgcgatagcgttggcgaaatgaacattgcagatactgcttattacggtgtgaatgccgctcgtgcgcaagaaaatttcaaaattaccgataatttattagacactgattttattattagtctcgctgaaattaaaaaggcctgcgctttgaccaatcgagaattaaacgttttagaacccgcaattgctactgcgattgtccgcgcctgcgacgatatcattggcggcaagttacacgaccagttcatcgttgatccccttcaaggtggcgctggtacgagttccaatatgaatgctaacgaagtgattgccaatcgcgccatcgaataccttggtggcactcgtggtgattattcaatcgtccatcctaacgatcacgtcaacaaaggccaatcaaccaacgacgtttacccatcagccggtaaattaaccttacttaaaaaagtgccactattaatggcgcaattggattatttggaaacgacccttttacaaaaatcggaccgctaccaagacgtcatgaaattagggcgtacccaactcaacgatgcggttgccttatcagtcggtgatgaaattcacgcctactacacggtgatcagtcgcaatcatcaacggattctaaacgcgaccaatgaattattgcgaatcaacttaggcggtactgctatcgggactggtctcaatagtcatcctgatttcccacaaacggccgctaaaattctccgggaaatgactggttttaatttcttacctagtcaagatttaatcgatggcacccagaacgtcgaaagttacgccgttttggccgacaatcttaaaacactagcactgagcctttctaaaattgccaatgatattcgcttactctcttcaggccccttatctggcattggcgaatatcggattcctgctaaacaaaacggcagttcaatcatgcccggtaaaattaatccggtgattcccgaaatcgttaatcaatgcgccttcgcggtgattggcaacaatatgaccatttcgatggccgttgaagccggtcaactcgaattaaacgcttttgaaccggttatcttctataaattactcgaatcattccaatatttaacacgggtcattgacactttcgtgaccaactgcctagtcgacctcgaacccgatccgcaacgttgtctcgaaaatctcgaaaacagcacgtcactagcgaccgatttgtccaaagtcgtcggttattcacgagcggccaaaattgctaaagatacggttaaatccaaagatgatttccgcacgactgccctcaaagatggcatccctgaaaaattagtcaaacaattacattattgaaaggaagcattgtcatgacgattaatgaagaagcactcgctttacacgccgctaaacaaggtaagattgcgttggaaagtacggttcaaatccaatcgatgcatgatttagcccttgcgtacagtcctggggtggcggaaccctgtcgcgttatccaaaaagatcccgaaaccgcctaccaatacactgctaaatcccatttagtcggcgtcatcagtgatggttcagccgttttaggcctcggtaatatcggtgctcaagctgcgatgcccgtgatggaaggcaaatcaatcctattcaaacaattcggccagctcgatgcttttccgatttgtttggacactcaagatcccgcggccattattacggccgtccaacaaattgcccctagttttggtggcattaatttggaagatattgcttcgcctaaatgttttgaaatcgaagctgttttgaaaaagacattaaacattccggtcttccatgacgatcaacacggcaccgcagtcgtcgttgcggccggtttaatcaacgcattaaaattagtccataaatcaatcgaccaaattaaagtcgtcctcagcggcccgggtgcggccgggacggccatcatcaagatgctccaaaatctcggcgtcaccaatattatcgccgccgatcaattcggaattctgcgcgctgacgattcaaatagtcaggcccataaacgcgaaattgccgcaacgactaatccggagcacgttaccggtcaactgaccgacgcaatcgtcgacgcagacgtctttgttggtgtttctgtcgcagaagcgctaacccctgaaatgattcgcacaatggcgccggatccaattatttttgccttagccaatccgattccagaagtgatgcccgaaattgccaaaactgctggcgcagcgattattgcaaccggccgttcggactatccgaaccaaatcaataacgtgctcgcattccccggtattttcgcaggtgccctccaagtgcgggccaccgaaatcaatgaagccatgaaggttgcggcagcctatgcgattgccaattacgtcacgccagcccaactaacgaccgaacacatcatgcccgaaatcttcgaaccggccatcagtgacactgtcgcccaagctgtggctcaagcggcgattgactccggtgtcgcgcaaaaaggagtgactgccaaatgacccgaattgaacacgacgcactcggtcccgttgaaattgatgatacccatctatggggcccacaaacgcaacgaagcctggaacattttaagattagtaccgaaacgattccactcccctacatcacggccctagcccaaattaaaaaagcagcggcaatcgttaatcaacaagaacataaactatctgacgaacgccaacaagcgatttgccaggcagccgatgcgatcattgctggtcaacatgacaacgaatttccattgagcgtttggcaaactgggagtggcacgcaatcgaacatgaacgtcaacgaagtgattgcgcatctctgtaatcaaacgcatgccgattggattcatccgaacgatcacgttaacctttcgcaaagttctaacgatactttcccgaccgcgatgcacctggccatcgtcgaagcgattagcactgaactgttacctgaatgtcaaaaatgggccacgctcttacagaaaaaaaccagtgattacgccgcgattatcaaaatcggacgtacccatttacaagacgccaccccactatctttcggtcaagaggtcagcggttgggctggcatgttgatcaataatattcaatttatcgaccaagcccaagacgccgtacgcaacttggcgattggcggcaccgccgttggaaccggcatgaacgcctcaccaacatttggcaccgcaatggctgaacaactcagccgccaatatcagttgagcttcactagtgatccgaataagttctacgctttaaccagccattctgccatcagttacctacatggtgccttacgtgccttagccggtgacctactcaaaattgccaacgacattcgctggttaagcagtggcccccgttgtggtttaggcgagattacgattccggccaatgaaccaggcagctcaatcatgccgggcaaagttaatccgacgcaatgtgaagccttaaccatgttggcggttcaagtcatgggcaacgacaccacgattcaagtggccgccagccaaggtaacttcgaattaaacgtctttaaaccagtgattgcctataatgtgatgcaatccattcaattactaactgacggtctccgttcattccgactcaattgcttagtcggtttaacgccaaacgtcgaaaaaatggcaaccttatgtgaaaactcattaatgttagtgactgcactaagtccccatattggttatgaacaaagtgctaaaattgcgcaagctgcactggccaaccaacagacgttaaaagaagcgactcttgaattgaccgatattactgaagccgattttgatttatgggtcaatccacaaaatatgatttagtttgtgataaatactacttatacgagtcattagcgataaatagcagtcacattaattgggtgtgactgctatttatcattgctatctcattaattttcgcttaatattctaagggtacctaattaatatcaaaggagattttatcatggcatcagacacaaaacaattgcgctggtttaacgttgccttaattgccttcgtcgccgtttggggattaggcaatgtcgtcaacaactatgcacaacagggactttctgttattacttcttggattttgatcatgcttttatatttcgtgccttacgccttaattgtcggtcaattaggttctacttttaaagaggccaacggtggtgtttcctcttggattaaagccactagcaccaaacggctcgcttattacgccgcttggacttattgggtcgttcacattccttatttggctcaaaaaccccaagggattctgattgcaatgagctggctctttaaaggcaacggtaattttgtcaacacgatttcatccttgacggtttcgattatctgtctcgcattattcttattattcctctggctatcatcacgcgggattgcgactttaaaccggattgggagtattgctggtacggccatgttcatcatgtcgattctattcattattctagccgtttcagcgcctctcatgactaagggtgcgcacatcgcaacgcctgatatgacgagtatcaaaacgtacattcctaaatttgatgtcaactacttcaccacgatttcaatgttagtttttgccgttggtggtgctgaaaaaatttcaccttacgtcaacaatacgcataatgccgcccgcgaatttccgaaagggatgttagtccttgccgggatggtcgcattttgtgcgatcttagggtcattcggaatggggatgctctttaattccaaccacattccatctgatttaatggcaaacggtgcttatgaagctttccgtcgtttaggcctttattaccacgtcggcccaactttcgtaattctctatgctctcgccaatacgctcgcccaagtctcagctttggctttctcgatcgatgcaccgcttaaaatcctattgggtgatgccgatagcaatttcattcctaagaaattatcgaaactcaacgctaaagggattccaaccaacggttatattttaaccgggaccttagtcggtttattgattgtgattcccgcccttgggattggcaatatgaatgagttatataactggttattaaacttgaactcagttgtcatgccattacgttacctatgggtcttcttagcttacatgctcttaaataaacaattaaagaaattcaattcagaataccatttcgttaaaaatccgactgtcggtatgattatcggcggttggtgcttcttcttcactgctttcgcttgtttgatggggatggtgccgaaactcagttacgccgctaacccatcaacttggtggttccaattgagcttgaacatcatcacgccagtcatcttcatcgcactgggcatgattttaccagccattgcgcgtcatcaaaataaagtagcttaatcaagctgtgacagaactcggttatcaattgagtggctcacacccacgggttgattctgagcattagcctagtttcgtgaataagtccggtttatgggcttgtttacgaaacgtcgctaggcacagggatcagtgggtattggcacgttataaatctgagtgctaaactcagccgataagcttctgagtatagcctagaattgtgaattatgaccgggtttagtcataatttgcgattcgtagctaaacggaagaaggtggctgagaagcacgttatcaattgagtatcaagttaaaaaatcagattatcccgtatttaggataatctgatttttttgatttgaacggagattgatgagttctggcacgcgtcaatcaaaaatagcgttaatcccggatcaactcaggattaacgctatttttgatttaaagttaatttattttacgactgattttaaactcactcaatcgtgtttttcgttgccaagggcgattgataaataaccaaccaacgattccgacgagcacaacattacggaggaaataccaaattaataagtatttttcatgtttctctaacaggtcataaggcactcgactgaaaaagccattcatcgtcatcaggaaggccacgtacaaagtgcctaagactaacaacggccatttcagccagtccatcgtcaccacttgattttgctgttctaacgaactcttttgatagattcgctgacctaaccataaaataaatacactgacgattaaaataccgataattaatgctaaatagcgcccatttctgtaaactacaccaacgtagtgagcatcaagcaaccgatttaaaaagactcgaagactctcaggttctgcgccatactgatcagctgtccggctctgaataaaacgtcgaatatcctcaaaattagagatactaaacgttaagctaaataggagcccgtaagcaccgaccatcagggtaaccagttcgccaacgactacccctaagaaacaccctaagatgtaaagcgccattagaataatcaacaaggccaattcccgttgtaataggttgccaatctcgatattcaaataggggtggtaaaccattgattttaaaattaaataataactactctggccaatgacaatgcccgccaggaccattaacccaactaattttattttggcccaataaattgatcgccgcttgatcgccagcccaaacaaaaaagcatcaaaatgcgtccggcggtcataggtaaaggtcagcaggcctgccgtcaaacaaataacggccattgtaatagtcatcatagacggtacggcattatccccgttatcaaaaaaggtcaaaacctgtttttgaaagctttcaagcttcactttagctggttgcttaccactgacatcttgataaccgatatagatcgacggatcggccttatagtccttcacaaatttggttgaatgataatattgattatccctttgccaagcctggccttgttgtaagccaacagccgcttgaatcccgaccatcagtaacaataacccaattagatatttgaaatagcgttggtgcataatagccgctaattgttgtcgtgtcatttcaatgtccccctctttcttaaataaaaacttgatagtcctcttccgtgactaagttcgcttcaaataaatcctctaacgtaatcggtaagctttcacacaagaccggttcatacgcttgaatttgcgcagctaattcatcagaataattagggaaataaacgaccatcacgcgaccggagactgataagactcgaccggcttctttgaacaacgccggtatcgtattggtttttaacacaatttgtaatttacggtcggtttgccgtaattgttctaattgataatctttgataattttagtctctttcagaatcagcgtacgatcgattaattgatcaagttcaactaaattatgcgacgtgattaaaaccgccgtctgggtttgtccaacgtggtctagcaagagtcgaataatgttcttccgaacaatcacgtccaacccgtcaaacggttcatccaataataagtaacgcgcatgactacatacggctaaaataatgttaaacaacccctgcattccttttgacatctgttgataccgttggtggccgtccagatgatacatcgccaataaatccgttagctgatcggtatcaaaatcgggataggcttgcgcatagtagcggccaatttgtaataactgattacccttaaagaacaaatgcgcttcatctaaataaaagagttgcgtgcgcatttcgggttgaacagcgacgtccgtttgatcaatcaagacctgtccgtcatctaattgatacgaaccggcaatacaccgtaataacgtcgatttaccgacaccgttgcgtcccactaaaccaatgatttcgcccggcttttgggtaaaactaatcgctgttaatattgattttttatcaattgttttatgaacgttttgaatcgttagcatctgtttgaccccttccataacttatcgcaagccattctgtcatttcagtttgtgaaacgcctaagtaactggcttccaaaacaagttcatctaatctttcttgcagttgttgttgctttacgagatcgcgctgttccgtttgacgatcagcaatgtaggtcccgcgacctttcacggtcacaatcacccgttgaacttctaataatttataggctttgctaactgtattgggattcatcaacaactggcgcgccatttcgcggactgaagggatttgttccccaggttgtaaaatgccttgcatcacttgttctttaatcatcaatatgatctgttcgtaataaggtttggcactcgttttatcaattatcattcagccattcaccacctttttttatcactgtactactgtgtactattatacgtagtacactcgtgaagtcaactgtttttatagcgccttaaaagccttaacttaatacaactcaaaaaatgcttacagactggtcttattcaccacttgtaagcattttttaatttatttttgtaaaattttcacaccgaatggcttcaactcgatttcttttagcaccacctcgttcgttaataaatccagtgtttcttcgaatggtaatgccactttaaccacttccggtgtgtgattaatgacaaatacatatgcttgattttcttgataacgggttgtaatttcaatatcttttggtgtgtcatacttctctagcgcgaacatttccgcccattcagtcactaaatgatctaaggcagattcaaccagcatcgaaccaacgtaaacggcctgtccccgtccaaactgatgagtcgtaaccactggcgttttctcatagaactttccagcgccataactcgccttaacctgcgccccttctaaatgaacgatgctacataacattcggcattcagcaatcgtctggtcagaaaattcaatcggatatcgttcctctggtggtaaagcatccatttcttccacccaaatcccgagaatatcccgtaatgggcctggataaccgcctaaatgaatattatccgactggttgaccatcccgctcataaaggtggtgacaaaagtcccgccttgttttacataacgacgaatcgcttcgtcaacaccttctttaaccatgtataataccggcgccaccactaaatcatattttgaaaaatcagcatctaacggaattagatcaactgagatattttgacgataaaatgcggcgtagtattggtgaatctgttcaacatatttcaacaagaatgtcgggccaatcgaatattctaacgcccaatagttctcccaatcaaataccaaggccacttttgaatggtgtcgtgcacccatcaaagtattgcccaacgccgccaactcatgacccagctgagccgtttctctgaaaacccgagtatttgtcgttccagaatgatcaatcaccgcgccgtgaaacttctcggtcgcgccttttgaacgccgcaattggaagaattgaaccgtatcagccccatgtgcaactgcttgatagctgagactacgcatttgacctggtttttttaaccaactatacatttgcgcattctgttgacttggtgtttgttccatcagcataaaaggttgcccattttttaagccacgcatcaaatcatgcgtcatagccgtcaaactaaccggcgttgataaatctggataattgtcccatgaaatgatatcgagttccttcgcccatttaaaataatcaagccccttataagtccccatcatattagtggtgatcggcgttttagaatcaaactgtcgaattgcggctttctcatcccgataattttgcaacagactatctgacataaaccgtttataatcgattgacaatcctgggaaaacaccgcgatctgttccaaaaccatcggctaagcaatttggtggcacaatatcttcccaatcataaagtgtatggccccaaaaattcatattccacgcgtcattgaccacttcaatagtttgatatttagcctttacccaaacccgaaaagctttagcacaattctcacagaaacactcaccttcatattcgttagaaatatgccagcacactaaatttttggactgaccataccgcgccgccagtttattggctaaaagtggtgaatatttacgaaaagtgggactattcggacacgcattatgccgaacaccgaatttatgcacctgaccattaaaatcggttcgattaacatccggataacgtcgtgccatccaaccaggtaatgcggccgttgccgttgctagaataatttgatagtgatttttttcgagtatcgctactatcttatcaagcattgtaaaatcatattcattttctgaaggttgtaaaagtgcccatgaaaaaacattaatcgtcgccgaattaatagctgcttgtttcaaaatttgcatatcttctagccaaatctcttcgggccattgctccggattatagtcaccaccgaaaagcatcgttttaaaattagcctctaccattaattttcctccttaaaaataggaatcctttagataactcaaaggattcctattaatgatcactttaaacagttaccaattatttttcttgagcaattgcgtgttcacggagtcgtttagcatccaagtccttcttgactttgccaaagatcttgtccatatcccagaagtaaatcataataaattgaccagcaaccactaacattgggagtcctaaattcatgaaaatcattgagaaaattgaagagtctgattgtgggcgaccagctgccgctgctgccgcgctgtaaccgcctaatgataatcctaatcccaaaattgctgaaccaatcccagttccgactttcatcccaaaacttgtacaaccataaacaaatccttctgcccgaatacctgatttccattcaccaaaatcggctaaatccgctgctaatgtaaaattcgcgacagtgtagggtgcaaccccaaaagcccggaaaacatttccaaaatagtagagtaaaacattgtggggatccattaaaacaattcccgttgaaatgaaagttaataagtatcccactaaaattgtgcgtcgtttaccaaatttcgcaaaaattttaggcatcatgacaattgcaatcagggttggtaaaacaacgataattgtattggttccaaaataactcatattccctaaaacatcacgtgcatagtaaggtccaactgccccataacctgcggaaagtgatccattaataaacaagaaaattaataagaaaaagtatttgcttgaagcaactgatttaaatgaatcaatcaggctatgtttttcgctggcgccaccttcgttataatcaagtgctactttttctttaatcccgaagaaacaaattgctaataagataaatgcggcaatcccataaacaattgaaatcaaagtccatgcttcttgtgattgagatcccccaaaagcgtttaataccattggtgtcccaacatttgtaataatggctaagaatactgtgaataagacccggacactcgaagcaacactccgatcttgtgaatcggttgaaatccgtggcaaggttgaatgatatgatagattaacaattgtataactaatgacagacataaaaatataagtaatcgcagcgtaagcatttttgccaataggactgaacccagctggtacatttaataagagcacaatactaattgataatggaatcgccccaataataatccaaggacgggttttgccccaacgggttttcgttttttcaataacgacgcccattaaaatatcgctgaatgcatctagcaaacgtgcgaccaacatcatgaccccaaaaaatgctggtgaaagcccaacactgtctgtatagtacaacgttagaaaagttgatgctaatccccaaacaagattacagccaacatcacctaaagcataggcaattttttcaggaaagctggttttaaaaaccccatcctgttctacaatttcttttgacatgtaaaacgcccccttcgattcttcctactaccaccatcaattgaacaattaattaaatagttagttgtttcgaattaccaaccatttccgtcagtataaatgtacccgttttcattgtcaaccactatttattttttattgattaatttctacttttcctaatataaatagcccgttttcccgcaatcgttaggcgatcaaataccccataaaaatccttaaccaggctttagcttgtcgacaaatgaaaacgctatctataaactgtgcgtatagtttgtttattccgaaaaccaactcaattaacagaccttactaagggggcattcgtaatggaactgtacaaggatcacactcaatcaccaaaaaaaagagcacaagatttattggcgcgaatgactatcgatgaaaaaatggcgcaggtcacttctgcgtacgctggtttcgctaaaattgatgacgacatcaaaaatggtatcggtgaacttcccactttgcggatggttggttttaaaaccctaaaagaggccttagagtggcgcgataatttacaaaaaagagtccttgccaatagtccccataaaatccctgccacttttcatatggaaggcctttgtggcgcctatattccgggtgcaaccagtttcccagcaggtatcagtcgtggggcttcctgggatcctgaactggaacgccggatcggcgaagttgttagtcgccaagaacgcgcgttaggcatcacacgcatcctcgcacccgtgctagatatttctagagattccagaatgggccgccaaggtgaaacctatggtgaagatccgaccatcagtgctacacttggttctgaatttactaaaggcattcagaatagtcattcacaaggattaaaagccgatgctgtcgccaaacatttccttggttttcacaatgctcaaggtgggattcatggtgcaaatagtgatacaccgccccgtttattacaagaaatttatggtaaatctttccaagccgcaatttctaatgcccatttaaaaggcgtgatgccttgttacgcatcaattaatggtgaaccagcttcctcctcaaaaccactcatgactggcttacttcgtgatgaaatgggctttgacggcgtcgtcgttgctgattacagtagcgtctcaaatgttcacaaggtccaaaaactgtataacagcttagaagaagctggtttacactgcatggacgccggagttgattctgagttgcccgaacgtgacgcctataatgagcaattaaaagaacaattcgaaaacggaactgccgatattgaaattctaaataaagccgttttaagaaatctagaatctaaatttagaatgggcttatttgaacagcccttcgcccttcgtggtgataaattcaagtctgaattttcacaaccgcaagatcaacagattactcgtcaaagtgccttggaatcattagtgctattaaaaaatgatggtgttttgccaatcaaaaaagaagttaagcgaattgccgtcgttggttgccacgctaaaaatgctagaagcttttttggtggttatacgcatcttagcatggtggaaacttattatgccgctgccaacgcaatggccggaacccggcgtaaagatggcgaccttgaggcaactcccaaagttcccggaacacaaattgaaagtgatgaaacaccgcaatttgacgaaattttacctttattatcaccacaatccaaaagcctatttgaagagatgcaagtccaattcccaaacgctgaaatcacctatgcttacggttatccgattgctggcgatgatcaatcccattttgatgaagcattaaagctgattagcgaagctgatctatgtgtcatgactttaggtggcaaaacgggttccaactccctatcaacgatgggcgaaggcgttgatagcactgatattaatctacccgtctgccaagatgccttcatcaaaaaagccgctaagttaaacaaaccattaatcggcgtccatttacatggccgacccatttcaagtgacgccgcggatcagtatctcaatgccattttggaagcttggaacccttctgaagccggcgcttttgccattgcctcaactttaaaaggcactaataatcctagtggtaagctacccgtttcagtggcttataatgccggtcaaattccaatctattataaccatccaaacggttctgcctaccatcaagccagaagtattggtttccaaaactatgtcgatagaccgcatactccccgttatttcttcggccatggtttatcttatacgcattacgactataccaatttaaccctcagtcaaacgcaagtcgcccctggtgccaattttgaaatcgccttcgacctaaaaaatagtggttcagtgtcaggcacggaaattgttcaactctatctcagtgactgctatgcttccatgacaagacccgtgatggaactcgtcggttttgctagagtgccactaaaagctggcgaacaaaaaaagattacttttacggttgaccccagtgtcatggcctttcttgataaaaatatgcaatggaaaattgaaaaaggcgctattgatatcaaagtgggtgcttcatcaaatgatatccgttgcgaaggtcactttaatattacggaagatttattcattgaaggtcgtaatcgcgcattctcagccaaggcaaacatagaatagacgcaaaaaacatcaactggatggcttccagattgatgttttttgttatagcgctttaaattgttgttcaaaatagtccgcaatttgagtcattaatgccggctgaacaagatggcgctgaccctcaccagttttaaacgacacgttttgcgcatacgcttcattttggattcgtgtataaaattgactcacttcggtatacgggattttttcatcagctgttccatgccagaacaataatggccgccccgcaattttagcgggctgttgcgctaaatcataatgatttagccaactcgttaataaggctaaatcggttggcaatcgatactgttgccccgcaaccgaccgtactaaccccgcataagcttgcaatgttggtgaccccataatacacgcggccactttgatttccgggtgttgcgttaacaaagctgtggtggtcatgccacccatcgacaccccaccaacgccgatctgctgatcttcaattaacgctagttgttcaaaataatcaattatcaaactaaattcgactagattagtttgaatactctgccaaaaagtccatgaagggattggactaatcggttggattcgttcaccatggtttaaggcatccggtaaaatcacgcgcagccctttatccgctaacttgcgtgcttgcgttagcaccaattctttcgtcgaacgccaaccgtgataatacacgactagcggtaatgcctgatggcgcaacggttctgcgaccacttctaaaatcggaatcgtttgaatttggcgctttaagattagaaccatcttgatgacctcccactgatggatttccccctcactataaagaatcttagctgaactgtcacttgatgtgcctttcacagcagaatcagcttaatctaaaataagctataacatcaatcttattatcctaatactaaacgaactatttatttgacgcgcgccagaactcatcaatttccgttcaaatcaaaaaatcagattatccttagtttcgggataatctgatttttcaacttgatactcaattgataaccgagttctgtcacagctatttcttaatactcaaaatctaaaccagcatactacatttccttcggtgcttggacgcctaatagatctaaagccgtttctaaaacggtgctgacactcttaactaatgatagacgcgcgttgcgttgattgtcgtctgccaaaattttagagttagcatagtatttattgaaatttttagctaaccgtaaagcatatttagcaatcactgatggttcgtattctttgctggcacgagcaatgacgtctgggaagttgctgagcatcttcaagacatcccaagcgttcgcgtcgtcaacgactaattggtcgtcaatctcaacttcttggttggctttacgtaaaatactttgggcccgcgcatttgtgtattgcacgtaaggaccagtttcgccttcaaaacgaaccacttcttctaaattaaagtcgaagttatctaagcgatcattcttcaaatcatggaagataaccgcgccgatgccgacttgtttagcgacttcagctttatcaggtaaatcaggattcttcgattcgatttgttggccagctaagctaaccgcatcatttaaaacttcttccagcaagatcacacgaccactccgcgttgataatttcttaccgccttgcgtaatcagaccaaatggaatgtgatgaatgtcgtcagaccaatcgttgcccatttcctttaaaacagccttcatttggttaaaatgttcacgttgttcgccacccacgacgtacaatgattgtacgaaatcgtaagtatcatggcgatacattgcagcggccaaatcccgcgtcatataaagcgttgcgccatctgacttcttaatcaaagctgggtttaaattataagcggtcaaatcaacgatttcagccccacgactttcttggagtaaccctttagattcaatcgcgttaacgaccgcatccatcttatcgttatagaacgcttcaccgttgtatgaatcgaactcaacacctaacatatcgtagatcttttggaattctttcaatgattcactacggaaccatgaccataattgcgtggcttcttcatcacccgcttctagtttacggaaccaagcacgcgcttcatcatccaattcaggatgttccacgtcttcttgatgaaacttcacgtaatatttcaataaattcgcaatcggatcagctttaacggcttcctcgctcccccattttttataagcgacgattaacttaccaaattgcgtgccccaatcacctaaatgattgattttaatcggattataaccgaccttcgttaaaattttagcgatcgaattaccgatcactgttgagcgtaaatggcccattgaaattggtttagcaatgttgggtgatgacatatcgattggtacgttgccaccgtgacctaaatcactttgaccgtagttacccatttccgttaaaacggtttttagaatttgatcactaaaagcggctttatctaaaaagaagttgatgtaagggccagttgcgaccactttttcaaaatcttcagcattaatctgagcgactaaatcttgtgcgatttgttgcggtgctttgcgcaaactcttcgccaaaataaatgttgggaaagcgtaatcccctaaatctgacgtcttgggggtttcaattaatttttcgatttgggctaattctaatgtctcacctagaactgatgctaacgcattggccacttgttgtttaaaatccatgttaaattcctcctctaatttcgaacaaaaaaaagtcccttccaaataaatgaaagagacgagaattcccgcggtaccactcaaattgatcaatcgatccactttaaagtatgcaattgttcaatccaaagcgcgccacatcagcttaattattcggctttcacaatcccgaactcgcttctaatcgccactgatattattctttcgactgttctatcttgattcttagtataacgaatctcagtcgttttttcaaccgttattcagcagccaacgcttcaattggatctaacttcgccgctttacgagacggcgctagtgcggctagtaaactaatcagaatactaatgacaatcccgaaaataatatagccactcgagatatcaacaatcgccatgtgcgtcaacggtttcgcaatcgtattgacgatggcttggccggctcccgcgattaaagcgccgaggacacttgataataagccaatcaagaaagcttccgaaacgaataggtggcggatatccttcttccgcgcaccgattgcccgtagaatcccaatttctttagtccgttcagagacactgatgtacaagacaacaataatcataatcgcagacactaagagtgaaatgccggcaatcccagctaagacgtagaaggctaacatcaaatacgtgttgattgagtctaaaatcgcgccgactccggtaatttgataatctttatgtgctttaccatcaactttgctgctgtaagtcttaatcttattttgaacagctttgacattggccgtttcgttaattgtgacggcggtaaaattaggggcaaagtctaatttttgtgcagtatacatagccgctagtgtgttgtaattaatcgcgtcagtccctgatttaataatcccagaaactgtcaacgtcttcttcatttgaaccggttgttggtccttagaaagcgcgttaacgtaaaccgtaatcgtccgaccgaccatctttttataatgcttgtctaattccttagcggttgctttggttaacagaatttcatcttgaccgggtttatggccaaccgtaatgtctgacacccgctccgttttattaaaagtttggaacatttgaatcgtggtccgtttctttaaataattgacttgaaccccttgtgtgaaaaagcctttttcaacctttgtcacgttcttaatctttttaaaacggttcaggtccttcgttgctaaatcaccggtatcccccgcttgcgtttgttctttggtgatatttctggccacctggaccgtattcggattgacttgtgacgagacctgatcattaatataaccggttacgccttgtccgagacccagcattaaaatcaccgagaaaatcccaatcgacgcgccaaaaataatcaatagattccgtttgatatcgtaacgcatgtgttgcatcgccattttaaacgccgacgcaaaacttaacggactattcttcttcgtaacgacttctgctggcgccgggtaagccgctttcaatgacttgtcataatcaatttgaccgtcgaccatatggaccacccgtgtgccgtgatccgcaaccgcttgagaatgcgtgacggcaatcactaacttgccgtcttccgcgattttttggaggatttcgagaatctccgccgtattttgactatccagtgcccccgttggttcatcagcaataatcacatcgggatcggctgctagtgcccgcgcaatcgccacccgttgtttttgaccacccgataattgattcggatgtttatgtacatggtctttcaaccccacttgttcgagcaaggcggttgctttagccacccgttctttatgcgataaattggtcatttcgagtgggaccatcacgttttccaagttggttaaatgactgattaaattaaaactttggaaaataaagccaatcgtctgactccggtacgcatcgaatttcttttctgacgcgttttttaaagagtcaccgttaacgattaattcgccattgtattggtgatctaagcccccgatgatgtttaataaagttgatttaccgccaccggattcccccaagattgagacaaattcgccccgatcaaaattaagattgatgccttttaaaactttaaattcttctttattcacgtaatatgacttgtgaatatctttgatttctaacaatgtcatctgattcactcctgcccattcaatcgcctacagtttaaggcgtttactacagtcactactttaccaaaaccgtgataaccacacaatccgcctaaagtcttaaccctactgaataatcagcatatcattggcatcaaattgccaatccttggagtaggcgacttcccaataatagccattcaaatctttaaagtagccgctgtaaccaccccagtcgccccacgtcaatgccttcaccaatgtcgcaccattagctaacgccgtttgaaagacctgatcagcttcggccgcactcttcgtattataagcgtgggtcaccccgttaaatgtggtcggcatcgggttcgccgttacatcgaggccgatatccgccaataacgcttcgtacggaaagagttccaacttagtcccaaagttattaaaaaaagcaatcacatcggcgtgttcgctagcgggttcgttaaaaccaagtgcttgatagaatttgcgagatgccgttaaatctaaaacacctaaacaaattaaatggatactattcatcaatttaacccccttgattagttgtgagcccattataaccgataatcatgtataagacgactactcacacttcgacaacaaaaaaacgactatcctgaaatcagataatcgcttttgacacttgatactatgaagcgagtgacgggaatcggacccgcgacacaagcttgggaagcttgaattttaccactaaactacactcgcataccgctttagtacttgcttagtatagcatattatcccgactttgtgcatatctttttcaaaaaaacggttcaaggacttaacaaacccctacccgataaggtatactaaggtcattaagctaagattggagtcctattgatggtagatacgcgtgaagaaacaccagttgctactgaaacaacgacaactgcctttcattgtccagcatgccaagccgctattgattacggtatcaagcgttgtcctacttgtcagactgccattttctatcgcgatatgtctgaatctttttggaatgatcgtaaagttaaattactcaaacaaaccgatgcgattcatcgctaaaccataatttatacaagcaaattagtaaaccactattgatagtggtttttttagtgcccgatttattttaaaatcgccaacgccactgctgacaagcgattggtggccctttcttaatgtgaatgccatttgtatcccccctaattggttgctataatagctcaccatacacaggaggttgccatgttagagaaaaacaaaatgagtttatttagtttggtcatgttaggcctcagctcaattattggttcaggatggttatttggtgcttgggaagcgacgaccgttgccggaccagccgccattatttcttggattgtcggggcaattgtgattggcgctatcgcttttaattacgttgaactcgggacgatgttccccgaaagtggcggaatgagtcattatgcgcaatatagtcacggttctttattaggctttatcgccgcttgggccaattgggtgtcgctcgtgacgattattccaatcgaagccgtggccgccgttcaatatatgagttcttggccgtgggcttgggccaattggaccaatcattttatgcacaatagcgcgatttcaaatcgcgggttactcgtcgttttcctatttattatcgtctttacgttacttaatttttggtcagttaaatttctgacccgtttcacgagctttatcgccatctttaaattgggtgtgccgctcttaacgattatcttattgatttcaaccggttggcatcccgctaattttggccattcaatggcgactttcatgccgtatggttccgctaaaatttttgcggccacttcggtatcagggattatcttttcctataacgcctttcaaaccgtcatcaatgtcggtagtgagattcaggattccaaacgcaatattgggcgcggcattgcgatttcacttggcatcagtattgtgatttatctattattacaagtcaccttcattggcgccgtctcaccaacaatcatcgccaagacgggttggcacgggttaaactttcaatcgccttttgccgatttagcaattctattaggaatccattggttagccgtcttactctatttagacgcttttgtgtcaccatttgggaccggtgtttcgtttgttgcatcttgtgcgcgcacctttgccgccttgaaacaaaatcaacacatgccggccattattgggcgcttcaacgcgcaataccatattccgcgagttgcgatggtgattaacgcgctcgttagcatgttactcgtctcgatttttagaagttgggggactttagccagtgtcatttcaacggcgacactgattgcctatctgactggtccggtcaccgcgatgtctttacgtaaaatggccccgaatttcaaacggcccgttcaatcgcgttggctcaaagtcatggcccctttttcgtttgttctggctagtttagcgacttattgggcgatgtggccgacgacgattaaggtgattggcgtgattctgttagggattcctttttacatctattatgaatatcgccgccattggcaagatacttgggcgcaagttaaagggagtttgtggctcattatctatctcgcattgttatcgattatttcctatgttggtagtagtgcgtttaatggccgcaactggctgcattatccgtatgatttcgtcgtcatcacagtgctcgccttaattttctattactggggcgtcgttagtcgcttccgttcacaatactttgcacaagccgaagcgattaaccaaaccgttaaagattaacattaaactgctcattgcacacgcaccacttaaaaaggggcatccgccaaaaattctggcgaatgcccctttttatattgcggtgtacaaaatggcgattctaactactttggattgttcaataatgtataagcagactaggtgcattattaataatctctgctagaatggggacaatggcaacaatgaaagccctttaaatgaggcaataaaccatgcacgtttttaaaattaactcgactaaagctaatgtcgaattgcataccgtcctttgggaacccaccgaccaaacacccgtcggtattctccagattatcaccggtatggccgaatatatcgaacgctacaccccgctagcagattatctaaccgcacagggttgggtggttatcggccatgatcatctaggacagggccattcagtccaatcccttagcgaattgggctatttcggtaaagatggtgcggcgacactattggcggatagtttaaaaattggggaattcgctcaagaacgttaccccgagctccctttatgcgttctaggccattcaatgggctcaatgctcgcgacccagtatttgaaacaagcgtccagtcgattaagtggcgttatttttatcggggtaattgacgtccccgctgttttaaaagttggcttaccagtcatccgactcatcgctaaaaaggcgccacacaaaccggggaacgtcctaaaccggctcgcttttggcatctatccacaaaaatttgatcgacgccgccccttttcttggctgagttacaatttagacaacgtttccgcctatgaacaaaatcccctttgtggttatacttttaccaacaatggttttgcaaccctctttaccatcgcgcaacagtccagacaaacggattggttcgccacaaatcaaactttcccaatgcttgtcttaagcggccaagacgatccggccggtggtaatggtcgtcgggcccgccaattaaccagtcagtttgatcaggcgcaattgactgccgcgacggtccaaatcttaccacacactgcccatgaaattttacaagaaacgacagccccaatcaccttccaaaaaattgcgtcttggctatctatctaggctatactcagaagctaaccggtttatcagcaactttttatctatagactgccgcctctgacttctgcgacgttaccgacgattgtgaaagcctttggatcaaccgcgtgaatttcgttgataatatgttgataggcttggttggttaccactaacattaacatttgtttgccttcgttcgtgtagccgccggtcacgtcaaaaatcgtgacgccaacttcttcttcttcaagcaaatgcgcctgaatttcagcaatttgatcattactcatcacgtataacattttcttacgattcaaaccagtttcaatgtaattcatcgtcattaacgtaatcacggaagaaaaagtcgccatcataaatgtttcaaatcccgatacaaagacgttcgagaaacaaacgagcatatccaccaccaataaactgacggcggtattaatgttaaaatactttttaaaaattaaaggtgggactgttgagcccccacttgaggcatcaattcgatataacaaggcaatccccgctgcgtaaatcacactcccaatgataatggctaacatcttatcttccaccaccatcacttgcggcgtaatcgccaaacaaacaggtaacatcaaacttccaaataaaatcttaatcgttgtttttttatccaacaagaagtaggccaaaatcaacatcccgatattaatcacaaaaacgacggtcgaaatttgccagcccataacttcctttagcaaaatcccaatccccgtcgccccaccagccgcaacttcgtgtggtgcaaagaataatttaatcccaactgtgattgtttctaacgcgactaaaattaagcccatttgaatgattgtttgtttcatccttgatatagacatcgcttcacccatttctttttttattgttactataagtatatatgaatatcaatcaaaaatctagtcacattattgaactcatcaaaaaatcgacctaccacttgttagccctaagcgggacgtcgatttcttgtttatttctgattataatttaaagtgatagttgcttgaatataacgcaaaacgttctgcgcgatacgcgtaacctttcgcaccaaaattcgtaaacgttaaattgaacacttgttgattggtcgtcggatcaacttcgacaatgtgactggttttcccggcattattaaacccaaaatcaatcagataattaccattagtcatctttcgattgctcccaatcacgttactgaaattagttttacctaatgttttaccgtatgaccacgttttcttaatcgtcttattggtctcatcaatcagataactaaccccttccgaatattgaccactcgtctttttatcaccatttgaaatcgcaatgttattgttaaagaggaccagttgcttctggtcagtttcattagtggcccaaatggtggctgcgtgctggccaccggtgaaggtggtttgggcatccgccgctttcaatagtaacttccgataacgtgctggccatttgctggcagccttactactgaaaatccatttaatcttgcccgtttgataatccaatttcatgatggtatcttgactacgacttgaaatgacaatgctatcatcgctcgtatcgtaatcaattgaattttgatggaaccaatccaacttaccatcggcgcgtttcgttgccttgtattctttgtacagtttagcgggcaacaacttcttcaaatcgatgaccttaacaactttaccggtttttcgtgaaatttcgaccatcgtatcttcgacgtatttcgaaccgccatccgacacggttaataataggttgtggttcggcaattcgattgcatcatggtgaataatcgtggtttcatctttgctattcgccgattcattactcttggtttccgttgagaatttatattcctgataaacacgacccataaagtcggtttcaaccaaatcattatagacgaggtcggcattgtccggtttcgtcaaatacaataaatgaccattgcttaacactttaaaaatgtgttgaacataattcgttgaataccagcgaatttgaccatcggcatcgacgccaactggatattgcgttgaacggaccaagaaggttagattactgtcaccgattgacatcttcgtcttatcatttttagtgacctttaaagacatcgattgaatcgcttcaggtaaagccgccgttttaatcgtcaacgtcttaaccgttttatggccgtccttatcggttaacgttaatttaactttattttgatagtccgcgtacaaccctaagactgaaatcgtatggttcttttggtagctcgtttcaacgttactcttaatactggttttagcggttttaccgaccacttcaactgagactttaaccgctgaatccgttttgaaaacaaccaaagcactcagaggggacgtcccgtatggattgactttgacatacggattggcacttgtataatcaccagaatctaatttagcttggtaggccgcggtcagcttcttctgtttagtggcccgcgttttaatcgttttgctaccgatattctttttaatttgagcagtactcaaaatatctttattaaaaaatgttttaacgccggtaaattgatagactaatccgcctattaccaggcaactaataagaaccgctaatattattttaattcgttttcgcatcgtttcaaaccccttaatcactttagtacttgtaatattagcgattaaatatgaacattttatgcctattttctgaaaaaaagtgggtggcctgtcatttctaaatagctaatgtgtgccatttgctttataattaaaccttagcgaaaaacataaaaataacgaggttaagttaagatgaataataaagtacagcctaagaacatcgcaaaagggatgttctgggccactatggcgtcggcactttggggtgtttccggcacgattctagaatttatttcacagggtcaaaaaattccggccacttggttcttatccgtgcggacgttaggcgcgggtttgattctactgattatcggagcgtttaaattcaaactcgatattttcagtatctttaaatcaaaacgcttgaccgcttggctgatcgcctacgcgctcttcggaattatggggaatctctacacgttctttatgagtattcaaaccggtaacgcagccacggccacgattctccaatacttaagcccactcttcatcgttttaggcacattagcctttacgcataaatggcccaataaagttgatttaattgctttcggaattgccttaatcggcgtttttctcgccatcacaaagggcaatctcaataccttaacggtgccgcttaattcattgatttggggtgttttatccggggtcacggccgccttttacgtcgttctacctaaaccaatcgttgaagaaaaatcaccaattttagttcttggctgggggatgttcatcagtggggtcctcttcaatatttaccgaccattctggcaagcaccacccacgttaaacgcttctggaatattagcgattcttgccgtcattttaatcgggacagtcttcgccttcttagcactgctccacagtttaaacttcgcaccagccaccgtcgtcagtatcgtggacgcgattcaacccatcattactttcatcttgagtatgattttcttccacacgctattcagttgggttgaattagccggtgccgtcttggtgattgtcgcaatttatgtgctacaacgttatcaagaagctcaaaacgatccactcgcttaataaatattaaaatagtccaacaattcgccattcaggccgtaattgttggactattttttagcctcttcttaatattagtacatctcatttcactcgattgtcgctttgggagatgcagataaccattttgcatggccggcgctatttacgctgccatctaatcatccctaaagcaattagaaccacgaaacctgtcgtcccgaaaccgtcttttataaaatcacgattgacaatatattcaaccaatatcccaactaaactagacagcaccacaatcaccaacaaactaatatacggatgttgatccagtattctttttaatttagccaactggtgacctccacttgtttttatttagccctagtataactcaaataacgaatttcaattagcaagtagcttgggcgctctaggaaaatacggacctacgtgaaaaactcgctaccaatgacccacaaatcaaaatagaaaccaaaaagttaacccaggtaaataaccaaattgaaaaaacaaaagatgagggtctgattctcctcatcttatcgtgtctcttatttgttattgcaccgttaggtatttttgtggcgccaattatcatgtggcggaacaaaagattgaataccttttataaaatcgtctatctcatttgtattgtggccatcatttataacttgtttaccggttatggcaatctatcagattatttaaattggggcacaactagttattattagccggtgtaatccccattgtaaaaaaggcaaactctaaatcataatttatagattcctaattaattctggattttggtatttcaagttgttcagtgacaaaattttttcaatattctcctccattcattatgaaaatcttgctaaacaaaccaacgctatcgctgatttgtttagcgagtgggcgctgaaaagaatgttttaaatgaaagaccattaaccgtgttgttaatatttttaagttgtatttgaacataatcaatagcgccgtttgtacatctaaccgtacttactgtaaactctacagcaaatattcctagaatgttaaacatttcgataactgtcccaacatctgaaaatctaaatttgataataatgatattatccatattgcgaatactaataacgttaatgtctgagaatacttcatttaaaaattttttaatattattttccatatttacccactcttttttaacgtgcttctcagccaacttcttccgtctagctacaaatcggacgtcatgactaaataccagtcacaacgtccgattttaggctatactcagaagttaatcggctgagtcagcacttctatttttgttttctcaaaaagtctcctggttggactggagtggcacagtggaaggtgatgatttgcatcgcatgtggtgcacggtcaatgacttggccttcgtcatcccacatatcggcgacgacttgttgatggtgacggaaatttgggccgtagaattcaactgtatcatcaactccaaagttattccgttgttggacggtcacaatatgttgatcagcatcatacgctagcacttcaccaataaacgtgtattgtggtcgttttcggcgcttaccaaacaattcatcatcttgatctggcacaccgtaatagaaaccagtcgacatttctcgttgggcaattttccaaagttcatcgacccattctggtttgagttcataattatcaggatcggcacaataactatcaacggctttacgataaacgttagcgaccgtcgaaacgtaatggaccgtcttcatgcgcccttcaattttcaaactattgacacccgcttcaaccaaatccggaatatgttcaatcatacacatatcaaccgcgctcatcgaaaaggcttcatccgccttaatttcagaatcttgatcgcctaaagttggcatttcaaataaatcatatttccaacgacaattttgcgcacaaccaccacggttggcatcccgttgtgacatatgattggataacgtacagcggcctgaataaccgatacacatcgcgccgtggatgaacgcttcaatttcaacatccgtatgtttttgcatttcattgatttcagcaatcccgacttcacgacctaaaacgatgcgttccaagccttccttttgccaaaagttgagggtttcatagttggcggccgaggcttgcgtcgataaatggacggcaaggcctggtgcttcagtaatcgcaatttcgattaatgctggatcagaaacaatcgcggcatcaatcccaatatcgcgtaaggttctgaagaattcgccagcgccatccgtattgccttcatgcgcgacaatattggccgtcacgtagaccttggcatcgtgttcgtgggcgtacgccacaccaacggccatatcatcgtatgagaaattagccgcacgggtccgtaacccgtaagcttcgccaccgatataaacggcatcggcaccgtaatcaatcgcgacttttaatttttcaggtgtcccagctggtacgaggacttctggtttattcgtaatcactctgctcattttattgtacctcactaggatcaatgtcgaagaagccggtatcgacttcgcggttcttaggtaaaagggcgtggagttgcgcgtctaaatcagccgctaacgccgatgtccattgttggttttcaaacgcgttttttgcttggataaataaaccggtaatcgtcacgtaatcatcgcctgggcagaaaataccatctaacttccagcggtttaaaccgagttcgactagtttatctaaacgcggcattaaatcaatatcgttgctcgcaaaaacgtgcgtgccattgcgatcttcataaattgaataatgggtttcgggcttgcggggtgccgaaatgaatagcccccgtttacgatctgatttttcttggtgtgctttcacaaagtcgaaatagttatcgactaatggccgacctgattgatgaatcgcggttgccccgaaaactaacatttcgcctgggacttgtaatgcgggcgccaacgttttcaattcttcatagggcacttcttgcgcgattaccgcgccttgcgcttggtgtttcgcccagaaattaatttggcgggcactcgtcaccgtgaccgaagcatcgtataaataagctaatggtacttggttctcgattaatagattaatggcgccagcatcgccaaccgtgatttgatcaactttcagactagctaagaattgcaaatagtccaagacgtgaactattcggtcgttatggaaaatggcattgaccgccaccgtcacttttttgccagccgcatgcgcgagggccaccacttcggtcaattccgctcgttcaaaactatgcggtaaccgcaaaccaaagtaatcttcccctaaatataaattatcgactccaagagccaacagcgcttttgcctgcgcaactgattctggcgttgccacaatttcaatcataactgcctccgtatttaactttttcaatactaactagaatagcacatttcaggccattgcgggagtccccttattcggacacccgcaattggtatagactaacgaatattaatcaattcttaatttaacattcattccaataattggtataatcaaatcattgatttagaaaggagcctatttatgattaatcaaaaaatgaaaacgttatccgatcaatatccaaccaccatggccattacctccgagattattaacctcaaagccattttaaatttgcccaaaccgaccgaagcgttcatgagcgatctgcatggtgaatacgacgcctttcaacatctaatccgaacgggtgccggtaatctgcgccaaaaaattgcggccgttttttccggtgagatgaccgaagaaactattaaagccttcgcgtttctcgtttactatccgacccaacgtctcgactgtaagcaccagcaattaacggccgccgaaatggaccagtggtatttgacgacttttaaacggttaatcgaattattgaaattcgtttcgactaaatatacccgttcaaaagtccgtaaagccatggcgcccgacttcgtctacatcactgaagaattgatgtacgatgacgtggccaacagtgataaacgccaatacttccaagaaattacgcaaactattattcaattaggccaagccgacgctctgattatcgccacttgccatacgattcaacggttagtcgtcgatcattggcacatcatcggtgatatttacgatcgggggccgcaccctgatttaatcgtcgaacaactgacccgcttacccgccgtcgatattcaatggggcaatcacgatattctctggttcggcgccgccagtggttcccaactctgcttattaaacctcttacggatctgtgcccgttataataacctagcgatcattgaagcgtcgtacggtatcgatttaaccgagttagtgcaatttgcgcaagctcattaccaagctaatccggccttcttacccgtcgatgatcccaatcaacccgctttatcgccaagcgaacaactcaagattagccaagttcaacaagcgttggcgattatgcaatttaaattggaacaaaccgtgattgcgcggcatcccgagtttgaaatgggccaccgccaattattatccaaaatcgattttgagcgccaaacactgcacattaacggccaaacttatccattgaccaatacctgctttcaaatgattaatccccaagagcctgccgcattaacgcccgaagaagcccagattattcaggcgttactgacggcctttacccattgtcaaaaattacggcgccatctgacctttttaatcgatcatggtagtatgtaccaaatctataatcaaaacttgctgttccacggttgtattccggtcgatgctaatggtgacttcttaaccttgacgattgctggtcaaccctatgcgggcaaagatttattagacttcttcgatcatcaaatccggacaagtttcaatcacccggcccaacaagataacttatccaccgatttattgtggtatctgtggacaggtccgctctcaccactctttggcaagaccgcgatgaccacttttgaacgttatttcagtactaatccacaattacacgtcgaaactaagaatccgtactatcaattacggcatcaaaccgattttatccagaagttattaacagaattcgacttatccccaacgacgggccacattctcaacggccacacaccggttaaaaaagggcatgatccgatcatggctaaccgtcaaatgatcgtcatcgatggtggtttttcgaaagcttatcaccacacgaccggcattggaggttttaccctactctacaattcatatggcatgcagctgatcacgcaccaaccattcacgactaaagccgatgcgatcgctaatatgaccgacatcatctcgaccaaacgggtaattgatcaagtcagccaacgccaacgcgtcagtcaaaccaatatcggagctcatattaaaaccgaaattacgcaactagagagtttattggcccttcaccagaataaaaactaaaaaagcttagattcggacgattttacacgcctgaatctaagctttttggtttaacttttaattggggtttcttcagtttgttgatttttactcgtaatcgtaatttgaccctttgttgcgccaattgtgaccggtgattcagtcgtaatttgacctgacaagagggcttcactcaactgatcttcaaccttggtttgtagcgcccgccgaattggccgtgcaccgtattccggatcaaagcccgccttagcgacaacatccatcgccgcagccgtcatcttaatcgtcacgccttgggcttctaatcgtttcaagacactcttcgccataattttgacgatttcgcgcaattcaggttttgttaaggaatggaaaacgaccgtttcgtcgattcggtttaagaattctggtcggaacgttttcttgagttcttccaaaatccgactttgcatcgctttgtaatccgccgtcacgtctttgacgccgaaaccaacggatttatcatcgcgtaaagctgtcgcccctaagttggacgtcataatcataatcgtattccggaaatcaactttccggccttttgaatccgttaaataaccatcatctaagacttgcaataaaatattgaagacatccggatgggctttttcaacttcatcgaataggaccactgaataaggtttattgcgcactttttcagttaattggccaccttcttcaaaaccaacgtaaccaggggcagccccaaccaaacggctagtactgtaacgttccatgtattccgacatatcgactcggattaaattatcttcggagccaaacatcgcttcggctaacgccttcgctaattcagtctttccgaccccggtaggccctaagaacataaatgaaccgattggtcgtttcggatccttcaagccactacgcgcacgacgaatcgcccgtgatacggctgaaattgcttcttcttgacccacaacccgttcgtgcaagactttttcaagctgcattaaacgttcactttctttgcgttgtaactgagtcacaggcacgcctgtccactgagcaacgacttctgcgatactttcgccagtcactttaatatcagcccgcacaccattttcttgggcttcagcttgtaacttcacgatcttagccttagtcgcaacttctttttcgtgtagcgccgctgctttttcaaaatcttgcagtccaacggccgtttctttctcttgcgctaacgtttggagttttaattctaacttatccaatggcgtcttctgattgaccgcggctaaacgaacccgagctgacgcttcatccatcaaatcaatggctttatcgggtaagaaacgattcgtgatataacggttcgctaacacgactgcttcatgtaaagcgtcgtcggtaatcgtgataccgtgatacgcttcataacggggccgtaagccagccaaaatctgttcagaatcttccggcgttggttcattgaccgtaaccgtagcaaatcggcgttctaaagccgcatctttttcaatatatttttgatattcatcgagcgtcgtcgccccgattaattgtaattcaccacgggccaaagcaggtttcaaaatgttagaggcatcaatcgcgccttctgcaccaccggccccgatcagcgtgtgtaattcatcaataaagagaatcacttgaccatccgcataaatttcatcaataatctttttcaaacgatcttcaaattcgccacggtatttagtccccgcgactaatgaacccatatcaagcatcattaaccgtttgtgtagcatatcactcggcacatcgccatcaataatccgttgggcgaaaccttccgcaatcgccgttttaccgacccctggttcaccaactaatacaggattatttttcgaacggcgcgccagaatttgaacgagtcgttgcacttctgcagtccgaccaacgacgggatcaatctgattatcacgcgccaattgggttaagtcgcgcgctaattgattaagcgtcggcgtaccttcttggacattattttttggtttcgtcttcgcccgttttttagcggttgtgctatcaacacccattttttgtaataataactgccgtgttttagccaaactcaaccctaaatttaatagaatccgagcggcaataatatcatcgtcccgtaacaaagccaataatagatgggccgtcccgatcttcatcgcgttgacttgttgggcttcaccccgcgcgacatctaaaacttgcttcgcttttggtgagtacggcaaataaccactcgcacccggtgcaacaaccgcattaccgtaaccggtcaagcgttcaatttcttctaagacgtcagtcggcgtcacgcctaattcacggagcgttgcgccggcgatgccttcactttccaataccaatgcaatcaataaatgttcagtccctaaggcatggtgattgaacttttgtgcttgttcttgggccaacattaaaacattcttggcactaggtgtaaatagattattcatagataacccctcactttttacttaatttcgtatcgtagtcgttctaatacagcaactaatatttgcgctcgtaattgctcttccaattgtttatcattcaaggctaacgtttgtggactcatcgccgccagaatcaggttgccctctttttgtgagagaatttcctcatcatatagcttttgaataattgccaaggtatcgttctgcgaaatccgcgaatcgatattattaatcaaggcttccaaaaaatcgcgatcgtctaaaaattgcaccttaacaatccgaatgtaaccaccgccaccccgtttactgttgacaacgtaaccccgttgttctgtaaaacgggtattgatgacgtaattaatctgtgaaggcacacagttgaataattttgcaatttccgagcgccgaatttcaatctgttcattatcagccaatatttttttcaaataggcctcaatgatatctgagatgttctgactttgcaaatatatcaatcccttttattcattcgtaagtttaactttgactaacgttgactattattataacgattattcccttaaaaagaaagtttactgacttttcagtagacaacaaaaaaggcttgcaacagcaagcctttttgagtcgggaaaacaagatttgaacttgcgacccctacgtcccgaacgtagtgctctaccaagctgagctacttcccggaaacttatttaatgatgtgttacgggtacaaaaaaagcggaagacgagattcgaactcgcgacccccaccatggcaaggtgatgttctaccactgaactacttccgcatttcttaactatttcttgtatccagcaataatgaccaacgattactggtggataccggcaccgaaaacgtgcatacaatcaatctccagaaaatccccagtcaaaacggggtgtttgccagccaagttgcaccaaatgggaggcagtaagcatgcaatatttaattcaatatcggcaaacgcaactgcttaaaatcagtacaatcgttgtgtccgtagttttaatgctcaatcgatccgtgagctttgcgttattcttattagtcggtttagtgttgcaatggctatttaatgtgcggcgcgcgtgggggctttatacaccgctcgtgacgggctgtctattgatattattgccccgaacggatgcgctggataattatacggtgctaccaatcttattattagtgcttgtgctcgcgagtttgtttgaagggggcttatacctctggcgccgagttcaaaccaatcaatttgcccaacagattaatcaatccggtcaaaccaaacaattaatgatcagcgatcggttattgaaggaaagcggcttaacggatgaggaacgttcattctttaaacgcgaaattaagaaatcctatgaacaactgacttaccttaaaaaggtgcaagtgcgggcgggcgaatacagtccaactgccgcggaagatattcggatcatcaatttgatttttaatgaattattgggcgcaccgcgacaaattttgaacgtttcagaatttttatacgatcatttaccgcagtatgtgcggttgacgcgtagtattctgagtttaagcaataatgcgattcaaaccgaggaggaccagcaacagtttgaacaggcgcaaaccgtcattgcgacgttatcaggcgcgtttgaacaagattatctgaaggtcacagaagatgaacggaaattgatgagttctggcgcgcgtcaaaaaataatattcgtttagtagcagaatacgacgacttataccacagctcatttttttatgcttttgcttttaaagcgagataatggaaaaccagttggcaatacgtcatgttggcccatgagaaccattcacgcgtgtattgcgcgggattatcgacatggacaccttcgtgacattgcaaggtcccattgtcagtcgcggcgattaagtcgatctgagcggtgacggccgctaaattagtggtcgttaacccaaccatcgctaatgcaattggccagacgtggtgtggcggcgtatgcggactaccgattcccgccaagaattgaccggcatagaagtaaggattagccggacttaaaataaagccccgtgtttgctgataaagcggttcgtcaattgaacaataacctagaaagggtgcggaaagcaggcttgggacgttggcatcgtccattaaattgacgtggcctaagccatcaacttcataggcccagattgggtcagcggttggcgttggacggaccactgcgaaatcggcaatccctgtttcgatttgttcttttaaagtcgtcattgcaccgactaattcaggctgatcgatgttttcagcgccaatcagggccaataattcggtgatgactacgacgatatacatattgccagggactaaataaccgtattggcaagcgtcatcacttggtcgaaaaccactccaaaccattccggtgtacccaataggcgcgccatgaccttcgtgacttaaagtgtcggatggcggacaatcaggtcggttgaagacgtaatcggaagtctcatggtgttgttcgcgaatgaacgttgccataatcagagcaacggtttgccagaattcaggggttaaatgctcagtcgtgccactggtttgatataactgagcggctaaatgaagtggtgcgcagagtgaatcaatttcgaatttacgttcccagactaaatcagaaatcggaatatttgaactatccgtcgtatagtgggccccagaagcggtctgattaaacgcattagcgtaaggatcatgtcggacataggccagttgctgattcaaaacaccttgaattaacgttttaacttgcggcaccgtctggatcaattggagatagggtagtacttggaaggttgaatcgcggagccacatggctggaatatcgcccgttgcgacgaaaatatcggtcgtattttgtggtgtgacggtgtgcgtgaccgtgtcgattaaggcgtttttaaataattcagttgctttattagaatgcagttgcacttgatcggctgcctgttgaatctcagcaattaactgtgcttggttaaacataatgttcctcctaagctcggggttgaatgggatagatgccgtaggtccgaatttcaccggggccaaaagtagttaaatcgtaatccgacggactagtggctaatgtggcttggacttgcccgcgtaaatcgagttcagcaatgcggcaattttggtgtaattcaaggctaccaggtaacgtgatggcttggtccgtcggattatacaagcgtaattcaaaaccagtgccgtcaatggtttgcatgaaactactaaacgtcacttggagatcattgactgcgaggattggtgcgtgcttaatcgccgttgcagttggattcatcatgaaatattgaagtggcgttgtaaaacgattgatcgtttgattttgataggctaagtcggattgactcaacaacaaatgtgcttgttgaagcgcggttggttgaaagtcaggtgtgacaactagcgcgccaccaaaggttaattgaccggtcagttggctatccggtgtcgcaacgactttagtttgtaaaccagaagcgtcagatggccgccgttttaaatctgggcgaccgagataaccgaccccccggaagagcgtgatcgctaattgatcgaattggtcgccaattaattggaaatctttcatcccgttagttaagaatgaccaactgatttcctgattgtgcgtgttggcaaaatgaatcatcgggcgcatgctagttggttcttcgtgatatccgattgcttgccaatctttcaaatgtggatcttcaacgggacgctgaatcgtcccaaatggggtgtcagcaaacgaatccgtcgcttgaatgccggtgtgtagcactagacgcatccggtgatcgagcacttgattatcaagcgtcagattgaagccgatgctttcagaatcttgcttcagaactaattcgagttgataagcgacttgaccggaccgcaattgttgttggcgttcagctaaattagcgggtaattgccaagtgccatttaagcgtagtcgactaatcagttggccttgttcgaagtggctgtggtctgcttgtgtgaaatcaagcgtcagtagccaatcggtaaaagcgggtgaaaagtcgtaagtatcgccttcatcaccaccatcttctaaggttaagaagttgtcataacgttgattagtggcttttaccaacaattccaattgaccgtcagttgcgctgatggcataaaagcgattatcaatcgtgtcggttgtctttagaacgggcatcgtagcggttgaagtcggttggagttgataaccacaccaatcagtggcgccaatcttagtttgaagcgcaattttagtcacgtagtagtagtcatccgtcatttcagccggattgcggcgtaaggtggcggcattttcttgttcctgtgagagcacttcgaatgcaaccagctgaccggttaagtcacagacgttaaaatgagcggtcttagttgaaacggtcaattcacggacttcattaatcgccattggcagtggattccaagcgaataaatcaatcggttgatcgttattgatggaaatactgagcttgcgtaataggtagtcttttaatgaataagcaagttggtgcgcagttaccccacgttgataaatatcctgattggtcttgtcactgttacagccaccagaactatcatgggcttgaccacgggcgatggtttgccaaatttcatcgattaaaccttgtttgctctcaatcccttgatgggcagcaagcgccattaacggttcgatttgataagtcatctcacgttctaattggtcgtataattgttttaaatcgtaacgggatgaataaatcccgcggtgaatttttgaatcagaaggatcgataaattcacccgaaaaagcgggtagattagtttcttgcgccaaagcgtcgaagaaggcgggatagttactctcaataattgaatcgttggtatcgatggcgtcgttggcttggtttaaacgcgttttgagattgaaatcaatcgcgcgttgatcaccgccgacggggagtacttggttggtggccgttgtatgggtagcaatccgcgttaatagcgcaggaacgtcatctttttcgattaagtcgacaccagcgtagtaaccatttttaatgttggccgcaatcacttgggaaccatcattactgtcccaatagaagtaacgcgcatcgttatcgctcgggaagccacgccagaaaacggtgctgttgatgcctacgccgttataaattttcggcatatcttgaccctgaccgaaagaatcgggtaagtaaccgactttcatgacgccaccgagggcatcaccaaggcgcatgccgagttttaggttccggacgattgattcaccagaagtcaccatttcatcgatttgcgtgtaccacggaccgataaataggcgccccgctgttacgaattggcgaagtacggattccttttctggaaaagcagttaaataatcatcaatgatcgataattgaccatctaataaataataatcaagttgattgtcagttagtgctgcgaaaacatcgtccatgtgaaaggcgaattgaacgcgcgcttcttgacgggtaaagtaccattcaaaatcccaatgggtatgcgcaattgcgtgaattttagtcaatttaaaacactccttctctcaatgcaattaaaacaattatgcagctaatgccttagccgcttcagcacgttcgtgacgttggtttagaatcacgaatggtgcgtataagaagacgtctaaaataacgagcactaaggttaagatgaccgggctaaagtgaaaggcgccaaggacccaagtactgatgaaaatcggttcattcccagaatttaaaacgacgagtggaacaacccaaccgatagaagtcacaacgtaggcaatgacggcattcgtaatagggacgataatccaaggaatgaacattaatggatttaagacgattggtaacccgaagatgacgggttcgttaatcccgaaacagcctgggactagtgcgagtttggcgacttctcgttctttttcacctttgtgggtgaaaattaacatcgcgatgattaagccgaaggtggcgcctgaaccaccaatcatagcgtaaacgttggtcattgtattaggcgcaattgaaatatcagcgaaactttgtgtttttgcaaattgggcaacgtcttgtaagaataatggtaaccagaaagctgaaaccacgccccaaacaatattgaagccgtgtaaaccgaggaaccagagaatttgttctaatagaataacgataataatggctggaagaccagtgccgaccgttaacattggtttgatcaacacttcagaaatcatttggattaatgacacataacctaatgattgaatgataattcggatgaccccgaaaaccaagaggacttcagaaatgggaattaatgagaaaaatgaatcgaaaacgttttgggggacgttacctggcattttaatcgtgaacttactacgagcaaagcgtgcgaataaggaaacggcaatcatcccaacaattagcgccgtaaacataccttcataactgaaaaacgaagtcgcgaaaccttcaatgactttggccttactgtctaagtaattaatattattaggcaccatgatgaagtaggcagccagtgctaataatgtggcaataaaaggattcatgctgtcattgcgtttatctttttttaattcagttgcgtaagaataagcggatgacaagacgacgattaaagcgacaatgccaagggttgcggtaccaagataaccaaatagattactggtattcgttaaccaaacgttgtgaatatccttggctttgattaaagcatcaatctgcattttaatcagattagagaatgaaccaacaaccgtaaatgggatggttcgaacgaaggcatttttaacggcttgtaaaatggtattttgttccacccaagcagaaaccttcaaaaggggttcttgtagcttatcgacattaaatttcataataacaactccttgtttgttttgagaagcgctttcaacaaacctaattatagtcaaaaaaatatatttgtaaacactttatttgtatatagatatatacaaattataaaataagcgttaaaatgaatatacaaattaactaaacgaggtagacaaatgtatcgctatcgagaaatttattcagatattaagcgggatatattaaccaatcattatcgggccggtactttgttgccgacgcaagaaattttaaccgaaaaatatgcggtttcaagattaactttaaaaaaagcactcaatttattagcggatgaaggtttgatttcaagtaaacagggttcagggacttatgttcgacctagaatggataaccaaacaggtgagttattaccattggatattccgattggggtcacttattcacatcgtgatcagaagattagcagccaggtgctgtattttaacgcgcgcctcccgaacgctaaagaacaacagaacttacagattgaagcgagccaaccggtttacgaaatcaaacgagtccggctagtcaatgaccagaaatatagctacgaacatacgattatgcctgtgacgattgcgccgttggatgaaacgattctacaaggttcggtgtacgattatttagggacctacgccaagattcaactgaccgatgcccgccgagtggtttatgcggaaggcgctgatcaagaaacggcttcagcgctcgaccttgcagtgggcgcgcccacttttgcgattgaacaaattgcttatgatcaaaaaggccgggcgtttgaatattcagtttctcggtttaccagtgaacgtagtaagtttgtcttagatattcatttgaaccgtttatattaaaaaaatgaccatccgcaaaacttggcggatggtcattttttaatgtttaaactgtttgtattgcgcttcgaggattgaactgtcgagaacgtggcctttgatggcgtcggttaattggttgagataaaagccatcggttaacgctaaagttgtgtctagcgcgtaaactttgagtgtatagttatgatcacgattcggcggtgtcatgccaccgtaatgggcggataattcggctgactgatgatcagtcagggggctgtgccaagtgttgacgccttgcacgaaatcgggcgcttgttgactgctgttttctagaacatcggaggtcattaaattagcgagcgtccaatgaatccacgggaaaccttgggtgacttcgtaggcatctaaatcataaaaaatcgccgcataactaacggtgtcagttggtgcttcgtgaatcgtaaacggaatcgaataggtcggcatgccgttttcattaattaagtcgccattgccaccataaatgggcttgtaaaagccattttcaataccagtacttgttattttcatcgttatgacctcattctgattaaattttagtccaatcgtcaatcgaacgaccatcgttatcgaggagttccagccaactattggtgccaccaaaatacaaaaagagacctaattcgttgacacttttgaaaataatgtcagtcgtggtctggtggttttgaatagcatcggcgtattcggtccgtaattgggtgcccatcttagcggcaaagccaagtgatccgtctttattcaaaggtacttctggcattaaatgggcaccggcttgtaataatagttcgttgcgcttttgccaaatggcggtgccggttgcttggcgggtattaatctgaaaaggaatctcactaacggccttcgtccaacgatggcgggtcttggccggtgctttggttggctttgcgtctgccggttgttgaacacttattccaaaacgggtcaggatcagtaatatttgggccattactggttgtaaactggcgcgataattgctcggaatttgaacgacaggttgtgtcgtgattaaatggggcagttcttcggttaataattgagcgagtagcgtaagttgttcggtccagtccggatcagtaaaagtgattagtgtttgttgttcggtgagtactggtagcggatttgaactagtcagtaccccaatgttagtcagtcgttggtgagttgctatgagccataaaccatttgccagtgactggcttgcgggtagtttttccgcaattgtgatgagcgattgttggttgtagtgaatttcagtctggtcaggggacaaggtaacttttaaattaagcattatcgtgaacctcctcaagagaatatacttccattaaacactaattaaaccagactgtcagctgcggaccattaatttgaacaattatcggatcagttcgtttaagaacaccattttttggtatgataggagtagcgattgatgaggaactaggagaaaatatgcaaccacaaaccgttttaaaagagaaatttggatatgatcaatttagacaaggccaatcagaagtgattgagtctgttttagcgggcgataatgtgttagccatcatgccaacgggtgggggtaaatcactttgttatcaaattccggcgttaatattgcccgggttaactctggtgatttcgcctttaatttcattgatgaaagaccaagtggatgccttaaatgaaaatgggattgccgcgacttttatcaatagtacgttggattatttcgaagttcaagaacgcttaaatcaagcggcacaaggcgctgttaaactattgtacgtttcaccagaacggttagattctgaacaatttctaagcgatttagcgggcttgaagattgatttgattgcgattgatgaagcccattgtatttcgcaatggggccatgatttccggcccagttacttgcgcttaacggacacgattcaaagggttcaaagtcaaccaacgattattgcattgacggctactgcgacctcgcaagtggcgacggatattatgcaacggttaagtattcaacgcgaagttaaaaccggcttttcacgggaaaatttagcgtttcaagtggttaaaaatcaaaatagcgatcgttatttactcgattatttaaaggtcaaccggcaaaaggccggcattatctatgctagtacccgtaaagaggttgaacggctgactaagttgattgaaaaggcaaaactgccggtcgcgatgtatcacggtggactcaacgaaatggttcgtcgccagaatcaagaagatttcttgtacgatcgtaaaccaattatggtcgccaccaacgcctttgggatgggaattgataagagtaatgtgcgctttgtcgtgcacgcgcagattcccggtagtttagaagcctactatcaagaggcgggccgggccggtcgtgatggtttaccaagtgaagcgattttattgtttagacaaaacgatgttcaaattcaacatttctttattgatcaatccgaaatggacgaggaacataagcaacgcgaatatgcgaaattacaagaaatgacccaatacgctagtactcagcaatgtttgcaacaatacatcgtgaattatttcgatgatcactgtgaaccttgcgggcgatgcagcaattgtttggatacgcgcgaggaacaagatatcacgattgaagcgcaaaaagtattgtcgtgtgttaaacgaatggatcaacgatttggtaaagtcttagtggcacaagtcttaaccggttcgaaaaatcaaaaaatcatgcaatttcgatttgatgaattacccacttacggcctattacggggggattcacaaaaagaagtcagtggtttaattgattatttggtggcctccggatttttacagccttcaagcggtcagtttccggtgctccaactaacagctgagggtgtcgcagtcttgaaaggccaaacggcggtgacccgtaaaatggccgtcaaagttcaaaaaacattacctgaagataatgaattattcgaacgtttacgggaattgcgtcgcgatttagccgaagaacagggtgtgccaccgtttgtgattttttcggataaaacgttgtattcgatgtgcgagttaatgcctacttccttaaccgagatgttagatgtcaaaggggttggcgaaagcaaattgggaaaatatggcgacttattcttagacgttttaaacgaggcggtatagcctgggaaataatccggttttaaattggccataaaaatagcttaggaccaaaacgtcaagaaaacgttggccttaagctattggctagtaaggtgcatcggctggattgccgtattcaaaatgctgattagatttaggattcggtttagcatcgggtaatagacaagtgtagcgagtaccatcaggaccttcagctaaaaaaatacgcgtaaattgattttcagtttcaatgactttacagttttcatgcgtaataccatagacatcagtgacttgcgtaataatcatctcttttaattggatttttgcggcgaggattctaaccgcgtcttacttataagtatagttgtttcggtagattaattcaaatttctgaactaatagtgctaaataggagctgattgttcacaatttctggcgttatgttataattaaccgggttcacaatatagaaaaaagggagtttaacaatgcggaaatatgtagcagaattaattggtacttttatgttagtattcgtggggaccggggcagtggtcatcgctaaaggcgatacgttaacgattgcactagcttttggtttaacagtgacggtgatggcttacgcttttggcgccatttcgggtggtcattttaatccggcggtttcaattgcgatgatgattaaccaacgcttgtcagttaaagatgggattgcgtatatcgttgctcaatttatcggatcagcattagcttctggtttgatggcgattttaatcaacgctttaagcttgagcaagaccgggttcggtcaaactgattttcctaaaatcggtggcggcgttgccttcttagttgaaacggttgtgacatttgcctttatcctagtaatcttgatggtcactagtaatcgttatggcaatagccaaatggcacctttagccattggtgtgactttgagtctattaatcatcgtggcgttgaacttaacgggcgcttcattaaaccctgccagaagttttggaccagccgttttcgcgggtggtgctgctttaacccattattggttatacgtcgccgcaccagttgtcggcgccattttggccgcattagcgggtcaattattcggtagcgaagaaaattaattaagtgctgactcagccggttaacttctgagtatagcctagaattgtgaattatgactgggtttagtcataattttcgattcgtagctagacggaagaagttggctgagaagcacgttatgatcgaagtgtgttgagttgcgggtagcaactgagcattaacaaaaaataccagttatcttgaacttaagataattggtattttaggttaagcggaagttgttgtaactcaaaagcacgttatcatcgaagtgtcgtcaatcacgggtagtttcggagcattagcctagttccgtgaataaagtccgtactttggactttgtttgcgaaacgtcgctaagcacacgaaactgtgagtgactgcacgttataaagaagtgctcacacaagcggtttgacctcgagcataacctaagaattgcccatatgatttgaactttaatcatatgggcaattctgtcgttaggcggaaaggtctgcttgagaagcacgttatcgattacctgttaaccaaaaacatccgttgccattaatcggcaacggatgttttttaatggtgggggttttgttccagttccagtagttgccgtttcagggctaatccgccgcgataaccaccgagagcgccatctttacgtaggacgcggtggcaaggaattaacagcaataatggattacgaccaattgcggaagccactgcgcgaatggcggtcggtcgaccaatctgttgggcaatctgaccgtagtcgcgtgtttgcccgtaaggaattgtttgaagcgcagtccaaacttggcgttgtagatcagtcccgccaatcagatcaatcggcacagaccaattggttgtttgaccagtccaataggcttggatggcggtcacgaaaggggctaatcgcgcttggtctaaaaccaattggtcaacggctataaaatgatcaatctcagttagggattgatcgggactaccgacgaaacaaaggccagcatcggttgttgcgaggtagtagcgctgagtatccagactgcattcaccatagtagattgtcgtcatcgtaaccccgccttttttagatagtgtagcctaaataagaccaaaaataaacgcaatgccctcgattgattgttgggacgttgcgtttattggatgaattaagaaacttcttcgaacgttttattttgaagatggaattgaacgtcacaactagcggcgacttctttttcatgagtgacgagaatcacacatttttgctgatcgtgcgctaattcttggaaaagtttgataatttcttgggtattggtctcgtctaaattaccggttggttcatcagcaacgacgactggtgcggaacagcacattgcgcgaacgatcgcgattcgctgttgttggccaccagaaagtttctgaacgtttttacgagccagcgcttcatcgattccgaccttggtcagcatattgagggcgtattcagtcggattatcttgagttgaatgggtgatctgcatggcggttaagacgttatccaaagctgacatgtaaggtaatagattataggcctggaaaacaatcgatacatagcgattgcggtattgcgttaagccaattttttggagtgaagtcccttcgtaaaggatttcaccacgccgcggtttgtctaaaccggccaacatggtcagcatcgtcgttttaccggcaccactgctaccaataatgccgtacagacggccggcttcaaagtctaaattgacatctttatagagtgtgttggcttctgtatcataccaataactcacgtttttagctgttaacatcatcattcctcctagttatccgattagaatttttcgtggctcaagtctgagaatattggctgaagcgagtagtacggcaaaggcgataatcgtaaagccgaatgcgcctagttgaagtaaggtgaccgcactgattttcagtttgagatcactactcttgacggctttgttagccgtcgtttgaccggcttgttgcatttgaccaccggtttgtttgccaccttgttgaccactaggggcttgaccaccgccaccaggaccgccagcttgactggtggttgaagtcgaggtggtggtttgacttgaattaaccgaagaaaggacctgtttactcaaggcattgccggcgaagcggccaccgattccggcgagggctaggctgaccacgagcagcattaacatttcgacgagcagttgaccaataattttggcacgaccttcaccgagtgagaggagtacgcccatttcataacggcgttcgcgaaccattaggatgatgattaaagctaaaataatcgtgccggcaattgccactaaccaaacgattttgttggcgaaactggccattttagtcatggattgtttcaaagcttgataagtactatcgtcagtcgtcaaactgaatttcttcgtgttgacgagtttcttggctgatttcaagaagctggttttcttagttggatcactgagtgtataagtcgcgctgtcgactttacccgtttggcctttaaattggttggctaacgtataagacgtgtagattgtgttggatggatcactttgttgaggacccatgctcgtgctgctggttgaactggctttatagatcccaacgacttttaatgtataagcggtcttaccggtcgtcgttgctttaactttgacggtatcgccaacacttaagctgttttgtttcgctaattcagattcgattacgacgtttttagtaccgacgtcgctactatttaaagtacggcctttggtaatcttattggtgctattcttgaagtcggttaaggtactcatgttgagcaccccagtaacttgtaaatcaccggtgctcgttgatgatgtggcttcactgcctgggccgccgccacccatcatggtgctattgctagaagatgaggtggtaatcgcatcaattgaggaagcgttgaccgaagtggtgacggaaacgttgtagttagctacggcctgcaatttggcaatctttttagcactcgccaatgaaacggacggcatcgacaaagtcggtttcgtggttttatcagtagaggtactcgttgatttgcgcatcttcgagaaggcttgctcccgattagcggtcagtgagacggtggctccgacctgttgtttggtggtattgacggtggtaaccgcagcgtttctaattaataaaccggccatgatgaagatcatgatcacggtcatcacaataattagtagcaagctgcgcccttttttgaaaatgacattttgccaagcacgcttgataaaattcatggatacgtcctccttaaaaaacttgatgaaattaattttaggcggattgttagaataaactgtgaattttaaagggggatttagtggcctttcttggaataattacgattggttgcggtgattattgaccattaaataaacggggctggctgtcgattaaataacagttatcattagtgagtcgttgcaatcgccgataatatagggttttcaccaggctagttctattatttaacttgttattgctaggcaacctgtagtatatttattacaaatagcatttgattgttagtaactggtctattgatgaaggaggggattgctttgcgtgaagttgacatgcataaattgatttttgcgaataatcagttgattccgaattctttggcacggtacgcgaagcttggcaatgttattttatacattgtcgatattgaaggtcatcttgtgactcaggtttacggttcacttgaaatggaaccagcgatgctgattaacaatgatgtgggaaccgatttaaccgttagcggtgttcaacagcacaattatcaactagaacacacctcgttgccgttaaaagtgcccaatttcaatgaagtcgtgggctacagttgttgtgcccagtacattgataaacatcaatcaaaagacttgagttatcgggaagaagcggccgctcagttagaagaaattagtgaagtcgtccaagatgttgttcaaaattatttaaaattaaacctattgatggctggtcaagagcaatttgtttttgatattccagaaacgacgaatgttccggtggtcgataatgaagaatcccaaacgtcagatatcatggaccaattacggcatttagcactaaccaatgcaatgattatttcggccgttcaatttattgatgaaaatattgaaatgccgttgaccttagacaaagtagccgcccatgtctatctatccccctattattttagtaagttatttcataaagaaactaatttaagcttttcaacgtatttgagtgcgcgtaagattcaaaaggcaacggatttattgaccaataaaaaactaaccgtcaaagaagtcgccagccggctgaacttccctcaagttagttattttagtcaaatatttaaaaaatatatgcagtgtacgccgtctgaataccgaaaacaggttaactcttagtgatttccgtcacggtgaaatcaagctgttttcggaagaagtcaatcacggcttcgagactggcgtgaatgtcggaaacgttgccagtgataaaaactgaaccgctgaagcgatcaacaaaaccgacttcaactgcgccagatttcaaggcttggtcgccggcaatgatggcggcttccgatggcgtaatcgtgataatgccaatggcgtcgtgacagtcttttaaccctaatttatcgtaaagatcttgagttgggctcgctacgatgtgggctaaagataactgtttgccagggacgtattcctgaataatccgttctagtcctgattcatgtgattccataagattgaccaccttgtcttaattattttgaatgatcgtgctgaattctgtgcaaatattgtgcaggatttttttagtttcttcattgattaattgaccatcagcatcgaattgcgtggccgcatttgcgaccagacattcagtttgatgggtcaatcggcaattgatagccggtgacgttaaaatttcacgaaggtgtagttgggcacgaatggttcccaagggtccgcttgaagcaccgattaacatcactggtttattctgtagaattgttgcgtccaatgaacaccagtcaattagatttttaatgttggccggcacactatgattgatttcagtggtggcgattaggagtccatcggcatctttaatggtggcacgggcgtattgcacgtcgggtgtaacggtggttgttaaaaagggtagttgatcaattgctaacgtttgaatttggaaacaatcgaccgttttaattttaagataattaattaatgcttgattataggagtgggcaccgtgactgccactaatcgcaacaattttataaaccatgaatatcaaactccaatctagactattctagttaaaatatgccagtcaatcgattgtttttcaattaaaaataatgaaaccgcttaaaaaacaacagtttaaggctatattggccaaaaaaataacaatttcactagaaatagtcacaaatagtgttgaattgttaaataatcaacaactttgaaagcccttttattaaaattgaacggggatgcctaatttttgacaacgcacaaacacttgctatgaaagcggttgctaatcgttaaggcggctaacggccttaatttttaacatattcttctttagcacgcaatttaagagaacaattttttaataaccgtttttattataatgtaagtgtattcataataaagaaaaaattctggaggtcgttcaaatgtcattagaagcgctaggtatgattgaaactagaggtttggtcccatcaattgaagcagccgatgcaatggttaaagctgcaaatgttagtttagttaatcaagaaaaagtgggccatggcctggttacaacaatggttcgtggtgatgttggtgccgttaaagctgctgtcgacgctggtgtcgttgctgctgaaagtatcggcgaagttgtttcaagcttcgtgattcctcgtccacatgatgaaattgaaaaattaattaaaatgcaatcgaaacttagccaagaataaggggctaaaaaatggcagatcaaaatgatgcgttagtaaagcagttgttaagtcgtgttttgcaatcagttgatttggacgatgcaaaatcaaaattaacgagtgaggtgaatcaaatgaaagacgctaatattaatttgacagaatttgttggcacagcacccatcggcgatacgattgggatggtgattgccaatgtcgatcgcggcttgtatgccaagttacatgttgaaggtgattaccgcgcaatcgggattctatcagcaagaacgggtggtggcccccaaattatggccgctgatgaagctgttaaagggactaatacgacagtcatcagtattcaaatgccacgagataccaagggtggcgctggtcacggttcattaattttaatcggtggggatgatgtttctgatgtccgtcgcgcggttgaaattgctttggaaaatgtaccgaagaagttcggtgatgtttataataacgaagctggtcatttggaattacaatatacagcgcgagcgagtcaagcatgtcatctcgcattcggcgcaccagaaggtcaagcttacggtttaattgccggggcaccagctggcattggtgtggtgatggcggatgctgctctaaaggccgctaacgttgaagcaattgattttgcatcaccaagttttggaacaagttattcaaatgaagggatcctacacattactggggattcaggcgccgttagacaagcagttatttcagctcgtgaagtgggaatgcaattgcttgggactttaggcgaaaccccaattaatgattttccttcatatatttaggaaggtgtggtggcaaatttgaaaagacaaaaaagagttgaagcattagaaaaacgaccagtccatttagatggctttgtcgatgaatggcctgaagaaggtttaatcgccatggaaagtccaagcgatcccaagccaagcgtcaaggtagtggctggcaagattgttgaaatggatggtaagtctgaagcagaatttgatttaattgatcaatttatcgcaaaacacgcggtagtcgctaaagatgctgaaaaagttatggcaatggattctttaaagattgccaaaatgttagtggatccaaatgtgcgtcgggaagaaatcatcccaattacaacggcgatgacccctgctaaggcagctgaagttatttgtcagttaaactttgctgaaatgattatggccacgcaaaaaatgcgcccccgtaaaatgccagcaacccaagcgcatgtgacgaatatcagagacaatccagtattgttagcagcggatgctgcggatgccgcattacgaggcttcccagaacaagaaacaaccacagccgttgcgcgttacgcacccttaaacgccatttcaatcatggttggttcacaaacgggtcgtccaggtgttattacgcaatgttcagttgaagaagccatggaattaaacttaggcatgcgcgggtttaccgcttacgctgaaaccatctcggtttacgggactgaacaagtctttaccgatggtgatgatacaccttggtctaaaggtttcttagcttcttgttacgcttctcgtggattgaagatgcgtttcacttctggctcaggttcagaagtcatgatgggttatgctgaaggcaaatcaatgttgtatctcgaaacccgttgtatttttattactaaaggttgcggtgttcaagggttacaaaatggggccgttagctgtatcgggattcccggtgccgtaccatccggtattcgtgaagtgttaggcgaaaacttgttatgtatgatgttggatattgaatgtgcttctgggaatgatcaagccttttcacattctgatattcgtcgtgccgaacggttactcggtcaatttattgccgggactgattacgtctcatctggttattcatcagtgcctaattatgataatacttttgccggttcaaataccgatgcaatggactatgatgactattacgctatgcaacgtgatttgaagatcaatggtgggattattccagccaaagaagaagatttaattaaagttcgaaataaagcggcccgtgcgctacaagcagtctttaaggcgcttgatttaccagcgattacggatgaagaagttgaagcagccacttatgcgaatacctctcaagatatgccagaacgtaacatggttgaagatatgaaagccgcacaaggcgtcttagaccgaaatatcactggtgttgatgtgattaaaggtttgtatgaaggtggcttccaagatatcgctgaaacggtcttgaaattgttgcaacaacgaattgccggtgatttcttacaaacatcagccatctttgataaagattggaacgtcatctcagctgttaataactgtaatgattatcatggaccaggtactggttaccatattgatgacgacttatgggaaaagattaaagcggtcccaatggccattaacccatcagacgtctaataactgtttaagaagggaggccagtatcagatggtcgaagtaaatgaaagtttattacgtgaaattgttaaacaagtgattgctgaaacaaaacaagctgatcgaaaagttgattttcgcaaagaagcccaatcaactgaacaaccagcagtcggaatgccagctgccacagatgcaccattagttttggattggtttaaacgtgtgggagttgctaaaaaagggacgacaaccgatgaagttgtgattgccgttttacctggattcgcagaacacatgactgaaaatatgactggtatttcacacaaagaaatcctacgacaaacaattgccggcatcgaagaagaaggtttgaaggcccgagtgattaaagtctatcggacggctgacgtttcgtttgccggtgctgaagcggatggttactcaggatcaggtgtcgcgattgccattcaatctaaagggacgacgattatccatcaaaaagatttggaacctttatcaaatctagaactcttcccacaagcacccgtattaacgcccgatacttaccggacgattggccgcaatgctgctcggtatgcaaaaggcgaatcaccaacaccagtgccaacggtcaatgatcagatggcgcgggttcaataccaagctaaatcagctttgatgcatattaaggaaacgaaatatgtggtcatcggaaaagcaccggaagaagtcgaactgaactttaattagtgaaagaatgtaggtgaaaaaatgactgaaattaatgacttaattaataaaatcgttaaagaagcaagtcaacaagttgctgataaccaaacggcgacagcaacgccaactgctgacaatcataagccaatgacggccgatgactatccattatttaaaaagcatccagaaatggtcaatgcgcctaatggtaaaaacgttaaagaaattacaattgaagcggcaatttctggcaacgttaaaccggaagatttgcggatcgcaccagcgactttaaaggcgcaaggtgaaattgctgaaagtgcaggtcgaggtgctttaaagagtaattttgaccgagctgctgaattaaccgggattccggatgaacgtttactagaaatgtatggggcattacggccataccgttcaactaaacaggaattaattgatattgcaactgaattagaagatcaatacggcgctaaaattaccgccaactttgtccgcgaagcagtggatatgtacggtattcgtaagaaattcaaaggggataattaagttatctcaggtgaggactgattaatgtgaaacgagttatcggtgttgacattggcaactcatcaaccgaagttgtgttagcagagattgaaacgaaccgtggcattcaatttatcgattcgaatattgctgagacgactgggattaaagggactaaacagaatctgttagggattagaaatgccatcaatgggttgttagaaaagtgccaagtaaccattgaacaggttgatttaatccggattaatgaagcaaccccagtcattggggatgttgcgatggaaaccattaccgaaacgatcatcactgaatcaacgatgatcggtcataatcccaaaaccccaggcggattaggattagggattggttataccgtgcaactaaccgatttatataatcagacggataaaagtcgacaatacattgtcgttgtgcctaaaacagttgattttgctgatgttgcccagttgattaatctgtaccaaaaaacgggctatcaaattaccgctgccattttacaagctgatgatggggtcttaatcaataatcgattggatcaaacgattccaattgttgatgaagtcgcctttatcgataagattccgttggctatgttggcggccgttgaagtcgctgataaagggaaagtcattacccaattatcaaatccatacggaatcgcgacggtttttgaattaacgtcagacgaaacaaaaaatattgtgccggtttcacgggcattgattggcaatcgttcagccgtcgtgattaagacgcctgaaggggatgtcaaagcgcgggtgattccagcaggttccatcacgattaatggtgatggtcgcacgcaaaccgtcgatttaacggcgggggccgataagattatggctgctgtgtcgacttttaaccacattgataacgtggttggtgaagccgggacgaatatcggtggcatgttggaacgggttcgccagacgatggcggaattgactaataagtcattatctgaaatcgctatccaagatttattggcggtcagtacctcagtgccaatcgatgtcaaaggcggattagccggcgaattttcaatggaacaagccgttgggattgcctcaatggtcaagtcagatcatttgcaaatggcgatgatcgcgactgaaatcaaaaaagcctttcaagatgtgaccgtcgaaattggtggggctgaagccgaagctgcgattctaggggccttaacgacgcctggaacgagcgcaccgatggcgattttggatttaggggctggatcaaccgatgcgtcgattatcaacgctaagggcgaaacggtcgcaattcatctcgctggtgctggcgacatggtcacgatgattatcaattctgaattgggcattgacgatcaatatttagcggaagatataaagaaatatccattagctaaagttgagagtttgttctttatccgccatgaagatggcagtgttcagttctttgataaagcattatctggtaatttatttgccaaaacagtcgttgatacaccaaccggttttgttccgattccgggtgatctcagtattgaaaagattaaaaatatccgacaaaccgctaaaaaacgggtcttcgttgccaacgcgattcgggcgttgaaacacgtcagcccaacaggcaacattcgcgacattccgtttgttgtgattgtgggtggttcagcgctcgatttcgaaattccgcaattagtcaccgatgaattatcacactacaacttagtggctggccgcgggaatattcgtgctatcgaagggcctcgtaatgcggttgcgaccgggttaattctagcgtatgtcgaaagtttagagggttagtcatgaccaaaaaaccggaaatcattattgctagcggtgacgatgatcagcggatccaggcacttttatacgggattgaggaagaagaaattccgtttaaagtcacgaccgtggcggttgaagaaccaattgcgcgggcgtacgaaagtgcgattgaatctcaattatctgtcgggattgcctacgatcaatcgtttgcctacttacattttaaaaatttgccacctgaaacgcctttatttaaggttagtttagacgatcaagatcagctaaatcgattgggcgccaacgctgcccgattagtgaaaggtgtgccgtttaaagagattgaataaaggaagtgtcaaaatttgaacgcattaggattagtagaagttgttggtttttctacggcggtctatgtagcagatgccatggttaaaacagccgatattacgattacgcggttagaaagaaccaaaggtgctggctggatgacaatttacgtcaacggcgatgtaggtgccgttcgcgctgccatttcagcggggcaagaagccgctgaaaaagacgataaattcgtgacagccgaaattattgcccggccaactgaagaattgagtcgcttagtgaaacctactaaaacagcaccagttgctaaagaaacggtcaaaatcaacactgaagttaaaaacaagaataataaaactaaaaaataaacaaccctattaggaggaaattattatgaataacgcattaggaatgatcgaaacaaaaggtttagtcgcagcaatcgaagcagcagattcaatggtgaaagcagctaacgtttcattagaaggctacgaaaaaattggttcaggtttagtaacagttatcgttcgcggcgatgttggtgccgttaaagcagccgttgacgctggtactgcttcagctgaaaacgttggcgaagttgtttctagctatgttatccctcgcccacacactgatgttgaaaaaatcttgcctaacaacaaataagcaacagaatttaagcatgattaattaagctggaggcaagaacaacatggatgaaaatcaattaagagccattattcgtaagattattgacgaagaattaaatggcgtcccaactattccggtcggtgtgtctaatcaccatattcacttgagtgatgccgattttgaacggttattccctggacaaaaaatgacggttttccgtcaattgaaacaaccttctgattttgcatcagaacaaaaggtcacattagttggcccgaacggcgttgaaattgaaaatgtccgaattctaggaccaactcgtgcgcatagccaagttgaaatttcaaaaactgaagcattccaactcgccattgatgccccaattcggttatcgggtgatttagaaggtgcgccttcaatcaaagttaaatctgaaaatgctgaaattacgattcaaggtgtgattgtggctaaacgccatattcatatgagtttacaagatgccgctaaattcggcgttaaatacggtgacacggttcaagtttcaattgaatccgatgatcgtaaactaatctttgatgatgtcttagcacgtccgcgtgaagatttcatcttagaaatgcatatcgatacggatgaagctaatgctgccagtgttggtccgaacacaattgcacgtatcgttcaacctagtcaagattaagatttgaaagaaggcgtcgctaatgaagccagatgttgatcaaattgttaaagcagtggctgaaatgttagccaaacgcgctaatcaggaacgaactgttagtattgaagcggcttgtcctgacgaaagtctttttctaagctattcgaccattattattgaaaatgttgatttattatttttaaagactttattgacactcgatccagagaagaatagttgggttaattggtttcaaaaagggtttaattatgacattcattttgaaatgcgaatcggttttcaagacatcaatttaataccatggtcgctgttaaccaagtggccgattcagtttacgagtaaagatcaacgttcaattgtcgttattaaccatccgcatattagttatgcggatgtgatgttaatgaaaaaggcgagcgtgttagccaaattaaaggcacaaaagttgacggatttagcgcaagaatcacttgctaaaagccagataccgataattgaaaggattgacagtcaatgtatatgggagtagttgttggcagtgttgttgccactcagaaatcaacatcgttagttggtaaaaaattaatgattattcagccaattaatagcgagcggcaaccagtgcgctttgaagaggtcgccgctgatacggtcggcgcggggatcggtgaaacggtcttattcgtcagaggagcagctgctcaccggagttcaatccaatccattaatgacgatcaagatgtgacggatgcgtcaatcgttgcaattgttgaccgatttgataagtaggtgagttttaaatggccatttatactaaaacgggtgacaaaggaacgaccgccttatttgacggtcgacgggttaaaaaatatgcagaccgtgtcgaagcttatggcacagtcgatgaatgtaatagccaaatcagtgttgcccaaaaattttgtcaaatccccagaaatattgaattattagaaacgattcaaaataatatgttcatcgttgccggcgaattagccagcgaggatccggataagttttatggtaagagtcagcaagtcactgaaaccgatattcatttattggaaaccgtgattgatgagtataccaacgccttacccgtcattcatgaattcatattacccgggaaaagtgttgccggggcgcatttacatttagcgcgttcggtttgtcgccgagcagaacgcttagtggtcaagattaatgatgaaacaacgattcggccagatcttctaaaatatattaatcggttatccgatttcttctatattctagcgcgggccgaagatgattacgcacaaaaggaacaattaatagatacggtgattgaacgttatcgccaaagaatcgaggccaaataatggcaatcgaaaatattctcacagagattcaacaagcaattaccaatcaagatggccaatcaatttttgatagaaaagcgttgcaaaaggcgttcgacgccggcgaagatcgggctaatcagttaggtgtcggggtcacgatgtgtgtgacggatgccaacgccaatccgattgtgctctatcatatgcccaatgctaatttggtcagcttaacactcgcaccaaaaaaagcgtggtctgcgattgcgatgaaaatgcccactaaagaaattagtgaacaagtgcaaccaggcgcacccttgtacgccatggaaaccatgctagatggcaaattagtttcatttgctggtgggattccgttagtgattaaagacaatattatcggcgcagttggtgtcagtggcggggctgttgaagaagatcaaagcatctgccaaacgattgtgaataaaattttagagggagttcagtaacatggataatttagaagcaaaaatccgaaagattttggaagaagaactcagttcaagtctttcaactaacgctagcacgacaacaacgattgccagcaatggcactaacgggatttttagtaatgttgacgatgccgttgctgctgccaaagtcgcttgggaagattacgttgatcaaccaatcgaaatgcgcaacaaagtgattgatgcgattaaagaaggtttccgtccacatatcgaatggatggcccaacaaattaaagaagaaacaggtatgggcacggtcgatgctaaaatcgctaagctcaataacgcactttacaacacacctggtcctgaaattttacaaccagaagctgaaaccggtgatggtggtttaatcatgtacgaatacgcgccttatggtgtgattggtgcagttggcccaagtacgaatcctgctgaaaccgtgattgctaacggaatcatgatgttagctgccggcaataccgtcttcttcggtgcccatccgggtgctaaaaatattacgcgttggacaatcgaaaaattaaacgaattcgtttacgaagcgactggtttgcaaaacttgatggttagtatcgacaaaccaagcattgaatctgttcaacaaatgatggcccacccagacgttgctttattagccgttactggtggcccagctgttgttcatcaagcaatgactagtggtaaaaaagcaattggcgccggtgctggtaacccaccagcaatggttgatgcgactgctgatattagtttagcagcgcacaacatcgttgattcagcgtcatttgataatgatattttatgtactgctgaaaaagaagtcgttgttgaacaagctgttaaagacgaattaattcgtaagatgcaagcagaaggggctttcttattaaagaacaaacaagatattgataagttagttaaaatgacgattcaagaaaatggcgcacctgatcgtaagtatattggtaaagatgccacctttatcttggaccaagcccacatttcttacacgggtcaaccaacgttaattatcttagaagctgattgtgaacatccatttacagtgactgaaatgttgatgccaattgtcccaatcgttagccaacctgattttgacagtgttctaaagaccgccgttaaagttgaacaaggttatcatcatacggcttcaattcattcacgcgatcttgttcaaatcaaccgggcagctcatcgcatgaatacctcaattttcgtcgttaatggtccgacttattcagggacaggtgttgggtttactggtgcctcagcattaacgattgcaacaccaactggtgaaggtacgacaaccgctaaatcatttacacgtcgtcgtcgtttgaattcaccacaagcattttcattaagatcatggaactagtctagaggaggtaccggtcttatgtcagattttcacgtggggacgcagatttattcaggccaaactgccttagatcaattagatacgattatgaatcaacgcatcatgttggtttgcgatccgttcttaaacggcagtgacgaactgaagaaaattaccgcccattttaatacgaataatacgactgaaattttcgcagatgttaaaccgaatccgccgttaaccaatattcaaagtggtgtcgcacaattcaaccaattccaaccaaccgtcattgttgccgttggtggtggttcagcgattgataccgctaaagcgattcgtttcttcggtgaaaaagtcagtgaacataaaattaattgtttcatcgcgattccaaccactagtgggacgggctctgaagtcacgaacacggcggttgtttcagatgaaaaaaataacgttaaatttccaattattgaagattatttaattccggatattgcacttttgtacccagaattagtgatgagtgcgccacagtcagtctctgccttttcaggcttggacgttttgacgcacgccttagaagctttggtcgctaaagatgcaaatctgttcaccgatgctttagctgaaaaggtcatcagcgtcatctgtcacgatttaaccaaggtttatcaacaacccactaactatgaattgcgagatgaagtgcatcaagcctctaacgcggccggtattgcttttaatcaagctgggttagggattacgcacgcgattgctcatcaattaggggctgtcttccatgtaccgcatggtttagcttgtgcaatggtcttaccatacgttgttgaatataatgcccaagatcctaagagtcgggctaaatatgcaacggccgcacgtaaagccgggctaatcaacgggagtaccagtgatcaagtggccgtcaagaagattgtttatcaaattaaagcgatgatgcgggcgatgaattgtccacaatcattggttaagtttgggattaaatcagccgacgctaaccaagcgattgaccgaattgtttcggctgctaaaaccgacggcactttcccaggcaatccgattgtcccaacagatcaagatttaaccgcaatttacaagaaagtgattgggtaagactaatcacgagtgattaaaggggttttatgaatgacagccaaaatattagcaattaactcaggtagttcttcgcttaaatttaaattatatttaatgccagctgaagacgtgattgccagtggtcaagtggaacgaattggccaaacgcaatcacaattcacaatgaaaacaccgcaacaaaaaattgaacaaaccttgcaagttaaagatcatgtaaccgcagttcaattagtgattgatcaattattagcacaaagagtaattgaagcaatgactgaaattaacggtgtgggtcatcgaatttcaaatggtggggattattaccaaaaggccgtcgtgattgatgatttagtggaacaacgaattgacgaaatggccactttatcgccattacacaatccagttaatctactggggattaaggcgtttaaacaaattctacccaacacgatgcaagttgccatatttgatacggcgtttaattcgacgattcctaaacaaaatgcattatatgcgattccatatgaatactacgaaaaatatggtattcgcaagtatggtttccatgggcctagccatcaatatatcactgaacaggtccaggcgttattcccagcgaaaagtcataaaattatcagttgtcatttagggagtggcgctagtatttcagccattcaagatggtcaaacgctggataattcaatgggctttacaccgttagcgggtctcatcatgggcacgcgttctggggatattgatccacaaattgtgccatttctagaagaacaagaggggcttagctcggctgagattaaagccgttttaaatggaaaatctgggttgctcgggatttcaggttattcgaacgatattcgtgatttagaagaagcctcagctcgcggtaatcaacgggccactttagccttacaaatgttcgtccaccggattcaaacctatattggttcgtatgttgccgaattaaacggggtcgacacgattgtgtttaccgctggcatcggtgaacatgacggtctgattagaagtcaggtgatggccaattttgattatttgaacgttaagattgatgaacaacagaatcaagcaaatgcattagtcattagccaaccagacagtgccgtgacaattttggtgatcccaaccgatgaagaaattgtgattgcacgcgatgtctatcgacagttaatgaaatgaacagcaccagtggaaaggaaccctaaaatgacgtcacaattaaaacgagttatccaggaatccgttccgggtaaacaaattacaattgcccatattattgcgaatcctgaacctgcgattctagatagtatcggggtaaataagcgccgaatcgcgttaggcattatgacgattaccccaccagaagcggcggcaattgtttctgatattgcctctaaagctggcgcagtggaaattgaatttattgatcgctttagcgggtcactcgtattatcgggtgaagtgagtgatgtcgagtctgcgatgacggctggtcgctattttctaagagatcatttagggttcacaattcctgagattacaaggtcttaacgtactattacaaaagaaggaaactggtgtgaacccagtgctgttcccgcaactgtaaacgatattatatcgtgagtcagacacttccatagatttgctttttcgggataaaaaagtatgagtcgtactgtttttaatgggtgcactctttggtgtacccattttttttaaaatttgactggaaacagtattaaatgaggtgtattagtatgaaaagagcgttattagtcggtgcggtcggttgtggtaaaacaaccttcaagcaatgtgtattaggtgagaagcaagaatacgataagacccaggcggttgaatttttcgatagtatgatcgatacgccgggtgaattcacagaacatcgtcgtttatattcggcgttaaacgtgactgcgaatcaaacggacgtgatcgtcatgatgcaaagtgtccaggataaacgccagattttttcgcctgggttttcgtacatgtttcataaaccagcgattggtgtgattaccaagactgatttagcagattcaccacatgatttggattatattaaacagcaactgcaattagccggggccgatgatatttttacgatttcatcgcggacgaatcaagggattgagcaactaataaattatttagagtaatgggtgaagttggatgtatgacgaaaaacaattagtaagtcgtgtcacaacatgggtcttagcgtgtgccgaatatgcacgtcaaaatgttgaacagattcaagatattaaacaaaagagtggcgagtacgatttagtcactaatttagatacaacgattgaagctaaaattgaggcccagatacacaaacattatccggatgctttaattattggcgaagaagcgcctaaacaacatctgaccacagcgcaagggttaactttttttgtagatccaattgatggaacgctcaatctagttaagaaacgtgattgttttgccattatgattggggtttacgatggtgaacggccaatctgtggcgcgattatggatgtgatgaaaaatcaattgtattggggtggtcccaatatcggcgtttattgtaatgatacgccggtcacgccaccagaagatagtttattgaaagacggtttagtcggcgtctcttggcgccaatttttgggcaatcggtttaatgaaattaaaattgcacaaaagagtgcgggcattcgcgtgatgggtagtgccggcctcgagtttattgaaattatgaatgggaagcatattgcttacctagcgactttgaatccttgggattttgcggcgggacaaattttagccgaatccttgggcctgaaggtcgtcaaaacggatggtaatcggttaaatcgcttcaagaccaatcacattattgcagcgacaccaaccgcgtatcaacaaattagaagattacagcatttttagaaaaataagattttggaggtcagttaaatgaattcgattccagtacaagcgttaggcgaattaattgggacttttgtattagtactattaggggatggcgtcgtcgccggggttagtctagcgaaaactaaggccaatggtgccggttggattgcgattacccttggttggggactagccgtcacactcggtgtttatacgtctagctttatgggtccggcccatttaaacccggctgtgacgttagcctttgccgtcatcggtaaaacaccatggtcagcagtgttgccatttattctcgctcaaatgattggtgcctttttaggggccgtcgtggtttgggttcaatattacccacattgggcagcaactaaggatcaagccgcgattttaggcacatttgcaaccggtcccgctattcggagtccttttgcgaactttatgagtgaattaatcgggacgtttattttaatctttgcacttttgggattaacacggggtcaattaaccgccggcttaaatcctttaattgttggggtcattatcacagcaatcggcttgtcactgggtggaacgactggttatgcgattaatccggctcgggatttaggaccacgaattgcacacgctgttttaccaattgctaataaaggtgattcagattggtcatacgcttgggtcccagttgttggaccattggttggtggcgttttaggcgctttagccttcatcgtcttaccatagaaaatcataaagttcaatatttcatatcatacgatatgtagtataattaggaactgtatttcgggttaatatactacatattgttaatcgaggagagagtgtaatgaaacaaagacatagtatctatacagcgatttgtgctggtattttattaacagcccctattttaacggcggtgacaggggtccaagcggctgaggcgaatcaggctagcaccagtagcttagtctcatcagccagcagtagtcaggcagcacaatcaacgagcagttcgagtgtcagtcaatcaagcattagcagcactgctagtagtcaaatcgctagcagtagtcaatcaacggcgaaggtcgcgcaatcaagcgcaccatcagcttcgacggctagtgctaaagaaacgacgacagtgacagcaccgttgaagacggactatcaagcggcgattactgcgggggccaaccaaattttgggtggcgattaccaaagtgcttggggtgctttagccatcatgcaatcaaacgtcacgatgacggaagcccaaaaagcgacgtatcgcgcagctctgaaggcgtcggttgacagtatggttaatgatgatagctttagtacaactgatttggaacgaatttcgattggggtcacagcgattggggacgatgcaactaattttgatggcattaatttaattgcgaagatcactgaaaatattaaaaaaactgggattaatggtcaaatttacgcaattattgccttgagcatgaaagattatggtgctgaagccaatcaaacaattgatgatatgattcaagtccttttaacgaaacaaaatcaagcgggtggctggtcatttggcggttctaagagtgatttagatattaccgggatggcgatgactgctttagggatgcatcgtgatcaaccggcagttcaagccgctatggatcgtgcaacgacaatgttaaaaacaaccgcttttgttaaaagtacgggtggtttcttaatcccaggtgctttttcaaaggaagagaactctagcagtatcgcgatggtactgatggggttgatggccaacaacgtgaatccaacaacgattgttggtgataacggtgctaatccgattagtcgtttgttagcgttccaaaaagcagacggtcaattccgttgggtttttgatagtgacttaggcgctttagcaatgtcgactgaacaatcagtttacgctttagaccaatatcaattcatgaaggctggtaaaggctcaatttataactttaaaacagcggcaccagtagatccagtggacccaacggaccccgttgatccggtcgacccaactgatccagtagacccagttgatccaaccgatcctgttgaaccggtcacaccaactaatccgacgacaacggctgatgcaactttagttaataaaagtttatcggctacaatcgcaccggttaaagagatggtcgcgactgaaattaagaatggtcaatttaccggttcagatgttatttttggcgctgctcggacgaatcaattaagtaaggtacagattaaaacattgtataatcaaatgctggttgaatctaaagccggtaatattagtcgaccaaacgatattgcccgggtaattttaaatttacaagcaatgggcattaacccaacggaattcgctgggcgtaatctcgtcaatgaattgtatcaaactaaagatgtgactaaacaaggcacttatatgacggccactatcttattagcgttggttagtggacattatcaagcccctactaatgcacagtttacggttaaggatttagtgcaatatttagtaaccgaagctgatgattatggtaatgctggctggggttatgaaacagatggcgtcttcatcaaagatttagatacgactgccattgccaccatcgctttgaagacaacggtggcgactgctcaaacatatccattagcggaccaattaatcagtcaaacgaatgaattgttgaaaaattcaacagcgtacattcaatcagctcaaatgactgatggtggctttggttatgccggcgctaaaacgtcgaatagtaacagtacggcaatggcaattgtggctttatcaacgatgggtatcgatgccaatacggttaaaaatggtggtaattcagcattagcggctttattgaaattccaagataacgacggtattttcaaggctgattattcaacctcaatggcaatgggccaagccttattagctattaaggcttatcaattgaatgcagctgggaaaggcagtgtctatgatttcgttgcaaatccagcgacaccatttgattccgctaaagtgcctgatccaattacggacccaaaacgtgatccattaccaaaggcaccagtaccagcacctacaacagttcctggcacaacgaatgatgatcataatgattcaacagatgttggccttttacctcaaactggggttaaagctacagttgctagcagtattatcgggattgttttaatcgttgggacattaggtgttttacgaaagaaatcggttaaagaagcttaggaggctttcatatgtcgaaaaaaagaattatcgcattagttgccagcgtattgattattctcggaatcggttacggcacgtatgctagtttaacgcagaatcattccgcgactgccagcacgagccaggtttcaaaaaagaaaacgagttctaaagatgcccagcctcaagagattgggttaaagggtaaggctaaagctaagaaatcagctaaaataactaaggcttctaaaaaggcggaagctgccaaagctgaatccgaaaagaaagtcgcggctagtcaagctagtagcagtcaaaaagtagccggtgaaaaggcagcacaagcggcatcagctcaacaagcaacgcaacaacaagtagccgcttcaacgagtcaagctgcagttcaatccaaacaagcagctgctagccaagccacacagcaacaagcaaccaataccaatcaacaagcacagacgacaactacgactgcacaaccggctactaataaaaaagtaacggttaatgtttatggaccaatcagtgaagataatcagttaatgatcaaccatgattcagtggctatcaatgatggtgaaacagtgattgatgtgttgaagcgagatacaagtagtcacgaaatggccttatcgtataaaggttctggtagtacagtgtatgtagaaggcattaatggtttgcttgaattcgataaaggttctcagagtggttggatttatcaagtcaatggggcattccctagctactcttgtggtagttatactgtcaagagtggagatgttatcaattggatgtatacggaaagtctcggcaacgatcgtcacgcgcctcagggctaaaatcacaactcgtttttgatcagttaaacccaatcgttatttttgcgtattacgtgattgtgattgcattttcgatggtttttattcatccaatctttctattagctgaattattagtggttattgcagttaattttagcgcgaagcaacaaaaaaagacctttgcaacgttgcaaggggctttgttcatgatggttttcatcgttgtgttgaatccgattattaataatcgcggggcgcacattatttggatgattggtgggacggtgatcacggctgaagcagttgtctatgggctattaatggccatttcactggccgtgttgatgctgacttttgtctcgtataaccacagcatgaccaaccacaagtttatgtacttgtttgtgcgaatctcgccacaattaacgctgctgacgatgattacgatgcgttttgtaccgttgtttattcgacgttttacgaatatcaaaaatgttcaaaaaacgcgtggtgttcagatggaaacgggtaaattgcgggaacgcgcccatgccgggatgcgcttaatggaagtattgttaaccaattcattggttgaagcattgcagactgctgattcaatgacggctcgtggttttggtgctcaaaaacgaacgagttatcaacgctatcgctttacacaacgtgacggctggctcttggccggtttggtcgggattagtagcttttgtttttggcaagcaagtcacggcgttggtcggttaccgatttatccggtgctagggtcggtccgactgacagcgaccggttggttgtgtttatggtttgtattaataattgatagcttaccgctattgttagaaggatgggaatatctatggtggtcattgcgcaagtaacaaatctaaattttcaatacgccctcgcgacggaaccgaatttaacgaatatcaatttaacggttaataacggcgattttatcacattggctggtaattctggtagtggtaaaacgacattgttgcgccaattaaaaaaagaattatggccggttggtgaacgttcaggtgagattgaatttgaaggacagccgcttgttgacttaccgcaaggccaaagcgcccagaaaattgggatggtcttccagaatccggataatcaattagtgatggatacggtaattcaagaactcgcattttcattggagaatattggggtgccgaatgctaatattcaaaaacgaattgctgaattagttagtttcttaggctttcaggatctattatatgcgtcagtccacgatttatcaggtgggcaaaaacagctagtcaatttggcgtcggtcttaatcttacagcccgatttattattgttggatgaaccgaccgcccaacttgatccgattgcgacgaaggaattcatcagcttgttgcaacgggtccacgatgaattggggattacggtgattatcagtgaacatcatttggatgatattttaccgttatccaaccaattatggttaatggatcaaggtcaaattagttatcaaggatcagtcactggcggcctacaagccatctgggagaaaccggcattacgcgatttcgtacctgatgtgccacacgttttcttgcaaaatggtttgattcaaccagaccaaattgacgaattaccgttaaccgtggtcaatggtaaacaactaattgaacaacggcattggcaactccagcatgtacggcggtcaattaatgtcagccaagccgcgccaattctgagtgtcaagaatgtgagcttccaatacgaaaagaacgattcttttattttagaacatttgaatttaaccgttcaagcgggcgactgggtcgcgattgttggtaaaaatgggacgggtaaatcaactttgttgaaagctttggtcggattgttacaaccgcgtcggggtgaaattaagttacaacagaagaaattggctaaatgggcatcagatgatttattcaagacattaggttatttatcccaaacaccgagtgaccatttcagttatgatacggtccaaatggaattctttgaacgcgcgcaacaactagagttgcccgatccaaccaatattgcccaggaaatgttggctaaattagggattacctatttggcagaacgcaatccgcacgatgccagtggtggtgaacaacaattgattgcgttgggcattatcttaatgtcgcaaccagaacttttgttgttggatgaaccgactaaggggttagatccgctacggaaacagcaattaggacaacttttacggcaactacagaatgacggtttaacaattgtgatggccagtcatgatatggagtttagcgcacgctttgcgacacaatgtgctcttttatttgacggtgaagtggtctcacaagaagaaccgtatgacttttttgcccataatttcttttatacaacagcggttaatcggatgttgcggtcgcaattaccggccgcgttgaattgggaggaagtgcgcgtatgaagtcaattctaaaaaatagttggtcgtcgtttggcctagcatttatcattatggcgatattcctcctctttatcgtcacacttcaaggtcaacactttctactgttcagtttaatttgtttagtggccagtatgttgccgttttattggcgttttgagactcgggatattcgggcccgcgagatcatttttatcgcagtgctggccgcgattgccgcagttagtcgggtaccattcgcaccactaccgagtgtacaaccaactagctttgtgattatcgtttcagcgttggttttaggcccagaatcggggttcatcgtgggctcaacggcggcgattgtctcaaacatgttccttggacaggggccatggacaccttggcaaatgttttgttggggtatgatgggcgtcaccgccggcttaattggccggtataaatgggctcagaataagtattggctctgtgtctttggttttgtctggggtttcttattcggttggatcatgaatctatggtacgtcgtggcctacgttaatccgttgacggttaaaacgttcattgccgcctatgtagctagcttctacttcgatttagcgcacgcgttgtcgaatgtcttttttctcttcttgttctacgaatcgtggtccagaatcatcaaacgatttaagatcaaatatggattactagaatagagtgtgttggttgcgggcagcaactgagcattaataaaaatttttattaattaaatctagcatcttcaacttggatatccatatagattttttgaagtaactcatcttcactgtacctttttgcattattcaataaactatctactgcgtacttatcttctgttactgaaactaataactcttgtcctgtagagataactatttgcggttctaaattcaaaataatatttctattaatatcaatccatagatgatattttcttaacttattttcaataactcttgtactagtacttgtctttttccctttatcatatttctcttttaatagaatatatttcctaaccttatcaaccgtaatactgtcacaccgagttattctaagtttctttaaagtattctcaactaattgattcataaattccttagtagatacatcggttataactgtgttggaagtacgcaaaatatcatagatatcttgttcactttttgtgtcgcttaattccactggaaatcctaaagatgaaataacagctccagaattatacttaatttcaagtttttttcctctaagtgaaaaattcaatataatccgagcctgttcaacgcttttgcacaatgtataacccagcctatcattcatctgctctctatacagatctaaaaactcaggtatcataatcttactagctattcgtttatccagcatccctttattattctgtacttctcgaatcaaagcagtaccttgtctttgttttttaattttcgtagcgatttgtatcggtaaatgttgcccatctgtagcaacgtcactattatatcgattatattctttctgtaaccttaaaaactctatattataagcatcaataacatgagttaaatcgtgctttaaatccttttgaatatagtcatctatgcatatttttatcttctttttgaggtttccaactctatcattaaatggttgcgttaatacatatcgagtataaagatcaaagttgcttattccatcagttacttcacgcaattttcgactaccgctatacaggagttctcttcgtttagcctgatcagcggtatctttattattcccctgttcagatagcgcaataatttttgaaccgcaatctcttccaatccatagattctttccatttattttattttgaatcttccatttttcttttcttaatctcgtattacataattgacatttatcaattggtttatctttaatagcaacttttttcttaagtacccattcatttcgagattgttttagccaaacatcactgttccggtcgatttctttcttttctttttccgtcaaaatatctttataatctggttcgttcaatttgcgtgctatttcagcatgattcttatcaatagatgctaagtaatcgctataaaaaagaagctttctatctgattttgcatcgaactttataaacattaaatatccccccaaattaattatctacttttcatctaattctatcataacgaattccatttcacgctagtaatgcactaaaagcatctggtttgcgtatggtttgcgtatggtttgcgtatggttttaaccagacgcttttctaaaaagggcctaaaccctagcctaaaccaatataaaaagcgtctggttaaaaccagacgcttttcaaacgctactactttaacttatatcctgtgctaacagatgcaccaatcttctcgataacattagcattctgcaacctatttagcgcagcaaatactttatttcgagacaaccccgtcgcttgttcaagttcagcccgttttacttttcgctgcttattcttcataaactcaagaataagctcatcatttgaatttaaaccccaatcggtatgtacaaaaacatgctctatgttaatactgtcttctaatacttgattcgtattaggcagtaccactttgaacgaattctcacgaacctcaaaacttggcgtcatcattgattgctgattagaataagcggtaaacattcgccgaataccggtaccgtaattttcaatgtaatgcatcttatccaaaatatgaattagtcttggattacgcattgcagttaatccatctttgatttcatctagggtcaatccatcaggtatcccccctggcgatgtaatctccaatcgattatcaaatagttcaactttaacgtccgagtgcagcaaataatctctatgcacaaatgcattcacaattgcttcacgaatcgcaaccattggataatcaaacttttccacccgctgtgcatcgccagtaatcacaacttgcttccgattaatcaatgaaatatacttcaaaacatcatcaatctgattagtaatcgcaccataaaattctttcttgtctttgaatgacatgacgtttaagccatcgtatacagccaatttagcagtatatggattttggtcgctcactaacagagcggcattattataactaccatcgccttcagacgttaccatccgcaaggcattttgatcaaaatctaattgtaatttatcaaacacccttgtggcgacttcaaaagtcaatttttgttcatctgaaatttctgcatcaaattcaccattaattttatactgctgttgcattcgtttaacgcgttcatttgatgctttgacggcagaactaccctcacgaacaaacacaccacttgaatcaaatccatttttatcgattgcatagggcttgttccgaccagccctaactttaatggtgaacaccgcttcatttggaagaatctcaatcaaactatatggtattgggtaaaacgcattggttatccattgactaatagtcccctcccaagcatgacgtgtatcctcagaaatttgcaaaggttctcgagttttatcgtcgacccctaaatagataatgccaccattctggctattcaagaaactaacaatttcgcgcttaaggcggttggttagttcacgcttatactcaatgccgccatcttcatttaccaattgacacgcctccactcatttcacaagtattaaccttctaatatcaataataccataggcccaataaatagtgatgctaattaaaagaggtctcccaatttgaccgccatttttaggtgaaaaaataggctaacccattgaagggctagccacaaataagcgcgtatctcccaaagttcggaagatacgcgcttattttacactatactcagaagccgaacagggtggtcaagactcttttgaatcatgctcctggttgcaacaacctctgcttaatctaaaaatcccattaatcctgaaatctggattaatgggattttttattaatgctcagttgctgagcgcaaccattcgcactctgctatttaaaacgtgcttctcagccaacttcttccgtctagctacaaatagcgaatcatgacaaaatccgtcataattcgctattttaggctgtactcagaagctaaccgggctggtcagcgctcttaaattagtttaatttcttcttgcttacaacgtttaagttttcgtctaaatcataaacaactggttcgccagttgccatttcaacgtccatgatgtcttcatcagagatgttttcaatgtatttagtcaaagcgcgtagtgagttaccatgagcagcgatgatgatgttttcgccgtcgattaattttggagcgatttcgtcttcccagaatgggataacacgttccaaagtaaccttaaggttttcgccaccaggaatagctttaggatctaagtgtgcataacgacggtcgtttgctgctgaaccttcatcacttgcatccaatagtggaggaagtgtgtcgtatgaacgacgccaaacgtgaacttgttcgtcgccccatttttcagcggcttcagctttgttttggccttgtaatgcaccataatgacgttcgtttaagcgccatgatttagtttctggaatccataattgatctgaaccttcaagggcatagtgtaatgtcttgatggcacgagtcaatactgatgtgtaagcttggtcaaaaaggatgccttcttgtttcaataaagcaccagcgttttgagcttggcgaacgccttcttcgcttaagttaacatcaacccaacctgtaaattggtttgataagttccattcactttgtccgtgacgaataaatactaatttagccatgtgtaagtaacctcactttaattttttgtttacgtttcttattttacactgttttcaagttaatttacagtcttatattttcagaaaattactttttggaacagccccatcatttcctgggttatattggttgaacactatcacgctcaattaaggaaactgctaatatccgttgttgaatcggtttatctggatcagcaatccgatctaataaaaggcgggtagcttcttggcctaattcaaaaatcggttgtttaatcgttgttaatttaggggtcacatattcacaccaatcaacgttatcgtaaccgataatcgatagattttcaggaatatttaattggtgttccgcaaatccgcggtacaacccgattgctaattcatcattgacggcaaaaacagccgtcactccgctcgcaatcacttggtcggtcacttgataaccgccttttttagagagttcagtattaattaaccagtcatcttgaaaattgatatcatgggccgccagtgcttctcgatagcctaatagtcgctgatcaatattccacgcactatttgcgggtaagacaattccaatctttcgatgaccatgttcgattaaataatcagtcgccatttggccacccattaaatcctggaccgtaatttcatcactttgatgttgtttttctgattggtctaatagaatgtaaggcatctgttggctagcaagttggcgcaaaatagcctcatctaaaccagaaacggctaaaattaaaccatcgactttgcgtcgtaccaattcttttaaataataatttactttttgattttgggttcccgcactatacaccagcggaataaaatcatgctgatacgcaatttcttcgatgccttgaatgaattcactaaaaaacggattattaatatccggcactaagaccgcaatcgtccgtgtctgtttattgaccatgttctgtgcgaaatagtccggcgtatatcccaatttaacttgcgccttgcggacccgatcgattgtttctggactaaagcgctgccctttatgatttaaaatcagcgaaaccgttgtgactgatgtttgcgctaaggccgcaacatctttaattgttactttacgtaccacttaatgacccccgattgttaagttctccattaaagtatacccttgatacccttcactttaaacaaaaaaccaaactaatcggctttcaattagtttggttttaataaatagcgtcttaaagttgaatatcttttgcataaggaattgagttttgggcacctttagtttgaacggcaatcgatgaggctttattggcatacgtcattgccacttcaatattgctgtaatccatttctaattgagtacttagtgccccaatgaaagtatccccagcagcggtcgtatcaacagcagttactttgaaggccggcacaaaacccgtttgatctggtgttgcatagaatgagcctttgtcgccaaccgtaatgatgacaactttgatacccattttaaacatcgcttccgcattttgttgcattgatgcttggtcggtcactttaatccccgtgatgatttcagcttccgtttcatttgggacaatcatgtcagtcaccgctaataattcagcgggaatatgcttaatcgctggcgcggggttcaaaatagtttgaaccccgttagtccgggcaatcttaaaggcttcaatgacagcgggaacgggtacttcaaattgggccacgattcgatcagctactttaatatcagcttctgcttgatgaatgtcatcaattgtgacgtcttggttggcgccaccatagattagaatactattttgaccagcttcatccaccatgatgtaagcttgacccgtgccagctgtttctgacatggtcacgtgctcaatattcatgccgtcttttttaaacgtgtccaacataaaatcagcagcgccttcgtgaccaattttgctaataaaggccgtttgtgcaccagagcgaaccgctgcgattgcttggttagcacccttgccaccaccggcaactgaacgtgaatccatcgcaagtgtctcaccaggttgtgggaaacgttcgatgcctagaattgtatcaacattggttgaacctaacaccattacttttttcatttgattttcctcctggttgctaaaagacaacgccactttctaaaataatgtttgaataaggggtcatttcgccagttcggacgaatgctttagccttacttagatcttgtttcatctgctcgtgttcgataaattcgattggggtgtcaccgattagcgctttaacgttggcaagttgttctggattttggtcgatcatttctttggctaaataaactttttgtacttctagttcacttaagacattttccaaaacttgcatgaagcttggcacaccattttcgattgaaacatcaatttttttcgtatcagcaggtactggcatgccagcgtccccaatactcattgtatcaaaatgtcccatgtctgagataatatttgaaatttgtgaattaatcactcttgttttacgcataatagcatttcccctttttatttaataaacgcggtgacagaaccggccactaagactagtaataggccaacgagtactgcaaccatttcttttttagttttcttttcatgtaagaagaagatactccccacagtggccacaatcacactcgtttgtgataaaacaaaaccagttgctaaaccattaacggagggttgtgctgaaattaagtatgttaaagcagcgaaggcaaagaataacccactgattaaattagtataagaagatttttctctaaatggatgtgaatccttattcgtatgcgcaagtgcaaaaacggtaccaacgatgaccatccctaaagcttgtggcaagaaaccttcaaaaccgttggcatcaacggcgcgaggaaaggctgaataacctaagtaacctaattcgccaactaataataataaaacacctttagtcgcagccgatttactttcaaccgtcttattttgagtccaagcggtcaagtaaacaccgacgataattaaagcaattgcgataaagccaatgacttttgattggaaactgatccagttacctaacaccaaaacgccccaaaccgaagcgccaattaattgaaaaccagtcgtaatcggcatcgtccgtgaaacgccgaccatttcaaaaactttaaatgtaatactttgcgcgagtgcccaacaagcaccagagattagacagaagataaatgttttggtttcgggaatcggtgtgccacggaaaagcatgaccacaatggctaaaattaacgtcccaaaagttgttccgatcaattgattggcgggtttaccaccaaacttaccaactaatactgggaaaacgccccaaccaatcataggcaataacccaattaatatatttccgatattcattattctgacctccgaacccttttttagcggttagtaaaacggtttactaactatcatgacatttattataacggtctcattttcagatttcaagcttaaaatgtaaacgtttcataaaaaagacaatcaaaaagcgtcaaagactttaattgccaagtctttgacgctttaaaaatttttttattttttcttcgcctgactataaccccgtttagatttatacccggctgctaaaatctggcacatctcgtcaaaatgcttctgttgcgtggtttcagcaacggcaccataaacgtagcgcgcccattcgcgttgatatcccggggttaatccgtcaaaaaagacttgaatctccggttgatcaactaaccgcgcactgactcttggaatatcgacttcatattccgctaatggtttttgtggcatttaaatcactccgtctattttaaccgcatgacatcgcgcacgatcatcaattcctcattcgttggcacgactaagactttaacctttgaagtcggcgtactgataacttgctctttgccgcgggttttatttttggttgcatctaattctacaccaaaacaagctaattgttgacaaatatcggcccgcaactcactgccgttttcgccactacccgctgtaaagaccaacgtatcaattccgttcattagtgcaacgtatgatccgacatacttcacaacgcggttaacaaaaatcttcaacgctaaggcggattgtggacgcgttgccgctgtctcttctaaatcgcgcatatcgggtgacaactcggacaaccctaataagccggatttcttattcaaaatattaatcatttcaggcatactgatggctaatttgtccgctaaaaaggccactaatgatggatcgatatcgccagagcgcgtgcccatcgtaatcccggccagtggggtaaagcccatcgatgtatcaactgcttctccattttcaaccgcggtaattgaagccccactgcctagatgtaaggtaatcatcttttgttcagttaatggcacttctaatatttcagcagcccgttgggaaacataacggtggcttgtcccatgagcgccgtatttccgagcgccgtatttttcataatattcagttggaatactatacaaataattttctttaggcaatgtactataaaacgacgtatcaaaaacagccacttcgggtgcttctggtaacagttccgtaaaaatcttgatgtagtaagcttgggttggattatgcaatggcgcgtattcggccaaacgattaatttcatcgagcccgactgcattgatgacggtcgaatctttaaataactcgcccccgccgacaactcgatggccaaccccggtgatttcttccaaatgttcaacaatcccaagttcttttaaacgtgttaataacaacgttgctgctaatttatgggtttcgatatcttggacttctttaaatttttcggtgccaaattttaccgtaaatacggaattcggtaggcccaaccgatcgatcatgcctttagcgatgacccgttctgccggcatttcaaataattgccatttcaaagtagaactacctgcgttaattgcgagaattttttccatgatatcgacccctatcaatcctttaataacacaattgtaagcaatttcataacaagttacaaccctcaatcgaccaacacacaaaaaggccattgattacttttcgtaatcaacgacctttttaatcaaaccttaatcagcttatcacacgcgctgatatcggctttatttagcgtcactcattttttgaacacggttcaagaatgaacgacccatcttgttatcctcatattcacttggttcaatcacatcagtatagaattgatcaacaaagctcaataaaccgtcaactttttcgcgacccatttggctttcaatttcatgatacttttcaacataacggctcactaaacggtccaagacttcttggccctgtttcgttaaacttaagaatttaacccgttggtcagtttgtaaatgttcttcaacgacgtagccattttcttttaaaagacgacattgacgtgaaattgcagaacggctgacactcatcgttttggctaaaatactccccgttaagttcgtattcgtagcaatttcatacatgattaaaaattgatcaaatgacactttataatttaaactttcgccactgacaaaatcgctaagattactgataatccaacgatagattaatgataagtgagtgacaacttcccagtcttctgagtattttccggtgatttttgcagacatattttcggctcctttagattaacaattcaattgtattggacagaaacaattaatggtttgaatttatttactctcaatatactagcacatattttcaaaaaaagaactacctgttttcaacaaatggatgcctttgcatttaatccaaaacaattaaattgttctccccaccatttcactattgacccgtttttattaaccaaatcataattttcaactatttgagcatactgattaaccttgttaaataaaaagcattagcgttaaacccacgctaatgctcttattagttattattttataaatttttatccatattaaatgtcaatttcgataaattaattcctgacattacaagttcaccaatcatgcccattgctttgtctttcatcgttttaacaatcaaataatttttttcagttaggaattttgtaagcgcttcgccctgatattgatgtgcttcaacttcaattgcatccaacatcgtgcgcaattcttttttgcattccgtcaaataatcgacatctttttggagatgttggctgtaatgaccttcgactaaaacggaaatcgtccgatacatccaataagcactattaatgtcccaagtcattggtgtttcactgaaactaggatcggtatcgttggcattcgtaaagaacggaatgaatggcgtatacgttggcatcccaagtgtaatccacatcactgcggcttgttccttagggacatcgttgcgcaattgtaagatatgcgcattttgcgtccggtttaaaccgattggacgataacgatatttatcagcgtcagccccgtgacccattggatcaaattccgtttcattatagtgtgaacctagtaacatttcgatatcttcaacactaatttgatgttcaattcggcgaataaaagggagatccgctgattcagggctcatgtcaaattcactatcgaataaatgatgtgcgtaccaaacccgtggtgtattgtaatgacgatctttttcattcattgtgccgaagatatggcggaaattccagcccgtcttatcaggattcaaatgatgggtttcaacatagtcttgaatgccttcagcccacatgaaattgtcggtatcagtaaaatcaacttgttgaatcgccacttgattggcagcaactgcgtaactgtcatccggaatccgttgggctaaccaaagatgccctgtgacgatttccatataccaaacttcatcgtgatcactgaacaagacactgttaccagcgggtgaaccgtattgtttgatcaaattacctaaatattcaacaccgccgcgcgctgaatcaatataaggtgcgaccatggcttgcatacaatcttcatctaagccgtctttgaccaaaggatcataggctaatgatttctcgttaccatacgtactttcagtacagctcattgcgacgttgacttcattaatgctactttcgtcataataaccattgtgtttgtaatccacattcggaacggctggccaccggtaaccattttcaggtaattcggcttcaaaaccgttcaaccaagatttaatcttggcgcctttgcggcctttaaccgccggattcatatataaacgttggggggttaaggggctaaaagtatcatcattacgggcaatcattgttgaaccatctaatgatgcttttttaccgactaaaattgttgtacaagctgattccatgtgtatcgctcctttacgtgattcaatcattaaattattctcataattctactttcagtgtacgccagtcgcggcggaaagtacatgataatctgtcccaaaactggtctgaaaaccgctaaattccgaattaggaattttcgtttattatccctcgtccattttttcactaactagccgaataattgcgacaaatatctgcaatcactgtttatccccgccactttcatggtatattataagttaagtatcctaacaataaggtggttccaacatgaaaaaattagcccttccgttattattagtgatgacctttgccttcattttaacgggttgtcaaaataaaacgacggtccctgaagcagcgacgaagactgaatctcagatcgaatcgtacgtgcaaaaagtcaatcaactttatgttgatgatgcgcacaaaaaaacagctgacttaaccgccgataagaaggcgacgattatcaaagccgctaaaacgctcgataacaaaattacgcctaacctctatatgagtggcattcatagttcttctaaaaaatcgtttgaatctgctcaaaaagacctcgcaaaagtcactggtgatactacgccggttgcagaatcatcttcaaaagaatcaacccaaacaacggataaagccaccacatcaaccgttaaaacgagtgctttttttgacaaagagggcatcgttaaaagtgacgcggtaatcggacaagaatcagattacacaggtcaccctaagaaacttgctaactataatgaagctaaaacacaattagaagcgattgcgaccgtcaataatctgtttaccgatgctaatcacaccacgattcccgccaccttgacgaccaacgattttccttacgcacaatcaatggttaataaggcgagtcacaaagcttttaaaacgaaatatttggcactgattaccaatgctaaaacccaatttgatacttataatacgaacaataccgtagcgacgacaactgataccactgcccagactacagatgcgacagccgggacaactgacaccaccggaacggctgatacaactggcacaacggctgctgacacaactgccgataccacgcaaactgggaccatcacacaataacttaatcattcagattcaagcctacttttcgtctaataagtaggctttttttgacgttcacaatagattagtcttatttagcgtcatatcttaagaaagttgtaacaccgcactaacttttatgtaacagttttgtcacgttgagatgctatgcttataaccgttgcaagtaaactaaaattaaacttaaattaatctaatcttgaaggagatttatcaatataatgaaaaagcaaaaaatgacttatttatcatcaagtatcgttggtttagcaggacttgttctaatgggtgttcaagctaaccaagcacaagccgcaactaccggcactgttaactacactgacggcgcaacaaccgtttggactagccctgaagttggtcaaaaaccaagtcgctatttagctaaagatcaacaagttaacatcgaatcaacaaaacaagtttacggccaaacttggtacaacttaggcaataacgaatgggtttcaagccaattcatcgcagctggtggcacagttaaagccgctgctacaacgacagcgactacaacagctgttaaagatactgttacagctaacttccaatctggcgcaacgactgtttggtctgacacatcagctagccaaccaactggccaatacttagcttatggcgcaactaaaaacgtcatcaacactaaggttgctaatggcacaacttggtatcaattagaaagtaatggttgggtgcctgctagctacgttgttttaaacaacccaagcttaacaaacgtgacaccaatcacaacagcccctgctgttaagaccatcgctgcaacggcaccaacaacaactactacaacgccggctgctactgaaagtagtacagccactgtcagctcatcatcagctgcagaaacggcctcaactgaaacacaacaaacaccagcaacttcaacttcaacagccgctgctactagcacacctgcacaaagcagttcagttgcttcaacacccgcaacaagtcaatcacaagcaacttcaacacctgctgcttctcaaagttcaacacaaactcaaacaacgactaatacccaaacaacaacgaacacgaatacacaagcaactggtagcacatcaaccgttgtcaatgctgccttatcacaaatcggcacaccttatgtttggggtgggacaacacccggaactggtcttgattgttctggtttagttcaatacgcttacggtcaagctggaaaatcattggaccgtgtcacaactgctcaagaaggtgctggccaacgtgtttcattaaacagccttcaacctggtgacattttattctggggtggttcaggcgcttcatatcacgatgcaatttatatcggtggtggtcaatacgtccacgcaccacaacctggcgaatcagttaaaattggtacgatttcaagctacttcatgccatcattcgccgtacgtgtcttttaattaaaaaacatgcgttaaaaaaccatgattgattatttcaaatcaatcatggtttttttgttacctaaaattaaaccgtaaaaaagcacaccccttgcttaacgattagtcgtcggcagtgagtgtgcttttaacattattatattagtcatataattatttggctgttttacgttcctttaagaagtttaagacagcggctgtttcgtccatccgttttttagtattttttacgttaataggacgacggttgccagaaacactaacatgtaagttttgtgacattacgcgtttcctcctttcgtgcatatattacttcattttaagctgaaattacttttttttcaaggtttctttaataaatcttcattagatttaatttttctaaaccgattcaagagccagccggtcatcggaaccgttaagataaccccaatgacaccgactaataacgaaatcacttcgcccattaaaatttgatgatttaaaattttggctaacggatacccgagttggacaaaccaaatcgttaacgataagaaactgccgaaaaaactgaagaacaacgtattaaacgcggtcgcaataattttttcaccaatttcgaaccccgcatggaatagtttggccggtgcaatcgtttgatcatattctaaaatctcgaccaagccactggcaactgcaatgctcgtctcggcaatcgcgcccagactcccaatcgtcatcatcaacaaactaatctgtgggaaagagagcccgatggccaaactaaaaccttcaatctcttcagcatcttccgcaccaaagccgtacgtggccgctagcgtgcttaacggcccaataatcagtaacaagcccgccaccacgattaacgccgtccagaaggcggttttagccgttaacggttgtttcgtattcatgaaaatcgacgtcgccaacaacgttagacttaataaccctagaatgaccaacggattaaacccgccggccaccaacactaacgccagaacaatcacgacgaagtttaaccctaaactgaagaaaatcgtcaagccttgcgggccacaaaccaggactagtaagcctagtaggacgaatgttaacaccatcatgcggttttcacccccactaaacgactcgctaaaaagcttgtgactggtacggccagggtaatgccaatcgcactaatcaccgtttgggtaaacccgatcgtcatcgtgcgcgataacgtgtaggcaatcgtattcccgttacgcaaatacaataacataatcggaaacgcctcggccatcacgatgaaaaacaacacattgacgagtgggccgataatttcacgaccgattgccaatcccgatttaaataattgcttcggggtgaccgtcggttgttccaacactaattgttgcagtgacgatgaaatatcggttgtctcgtccatcaccgcacccaaaatgcctaataagacttccgccaaaaagacggttttatacggctgtaattcataatccatcgtttcataatgaatgccttgatcgttggtgatttttaaaatcacaacgctgatcaataaggccagaaaagtggcactaatcgtcgctaaaaacgacactaaaaattgccggttcgggcctagaatcaagactaatgtcaaagcggtcaatagaatcgccaagccgcccattaacggtaataaccaacggccacctaaggccacgtccaaccgaatcgcaccgataaataatagtaggttcaatccgatgctcagaatcgttttaagcccccggttaaacatgacaactaataataaggttaaggttaaggtccctaaaatcaccccaaccaccacggtatcccgcttaggctcactcagcgtataacggtggctcgttgtatcttgatgtaaataaacttgctgaccgcgataataccgaaaactcgacgcttgagaaacggtgtagcgattttgcaattgaatcgaacggcccttagccgtcgtatttaaaaaggtcccggtgacttgttgggtcacatcggtatcttgattttgataatcatcgattgacttcgttttgtcggtcgttttaacttgggtaatctgaataatcggttgttgatatagtgatgcatcatttctcgtgcctagtaggcctaaaatacaaatcaacaagccgattaaaccgatccatagtcgttttttggttgtcacacgctcacctcgctatcctattgtagccttttagcggatgaagaccaaatccctttttaaatcttatcaatcatttaaccgactatgtttgatgccataactgaaatacacgattaagcctaaaacaaaccaaattccggccgcaatccacgtttcaatcggtaattcgaacaacatgaacaaacacagtgcccccgatattaacggtaagacggggtaaaagggcaccttgaacccatccttgttcggaatatctttacgtttccgcaacggaatgaccccgatcgacatgaagaaaaaggcgaccagtgtcccgatattgactagattggtcaattgatttaatgaaacaaacccgcctaacgtggcaatcacgaccgtcacaattttgacactgttaatcggtgtttggtgtttcgtttcaattttgcctaaggctttgggtaacaagccatcccgaccaatcgaatagattaaccgcgaactactgtaggtcatcgtcagcatcatggtaaacatccccgccaaagcgcctaacgagataatcccggcaaaccaattttgatgaacgacttttaacgcaaaggtcacgggatcggcaacattcaattcctgataagaaaccataccggttaaaacgaacgcgactaaaatataaagcaacgtacaaatcactaaggtgccgataatcccaatcggtaaattcttttgcggatttttaacctcggccgcggatgctgaaacacaatcaaacccaagataggcgaagaaaactaacgacgcacctttgaagaccccactcacaccaaacggcatgaatggttgccaattcgccggtttaacatagaaaacgccaatcactaagaataatagcaccacaccaattttgatcaggaccattatattattaatgcgggtcgatgatcgcgtcccggtcgttaagagtaacgcaatacagagcacaatcagtaccgcgaataaattaatatacgtgccatgcgccggatcaaacgcgccggtaatcgctttgggaatccggacaccaaaaccttcaataaacgagataaagtaggccgcccatccggttgaaacggcggccaccgataacatgtattctaagaataaggcccaacctaacagccaaccaatcagttcgccaaaaataatattaccgtatgaataagcactgccggctacgggtaaggctgatgaaaattccgcataacacatcgccgccacggcacagacgacggccgcaatcatgaacgacaccgtaatggccgggccactatgtaacgccgcaatcgttccaggtaaaatgaaaattccggtcccaatcaccgcgcccacgcctaacgcaattaaatccttcgctgttagtgttttggcgagtcgctgatcctgttgtaaataccgatccaatgattcttttctcaataaacgcgctcgtaagcccatatgaattctccctttttaaaccaattttgcaacgatgaccaaaaaaagacgcacactagtcttcactagtgtgcgccactagagaagaagacttggttacccagtcttcttctcgtttattaaggttcatcgttttaactgcaacgtttttccttaataagccagttgagaactgggtttcttaaagaaaaagctaaagactgtccgttgcattgtcatcatgataaaacctccttgttattaattaatttctaattataggcatctgttttctaattgtaaagcattatttttaatcattttctaatcagttgttttttaaacgcaattctgctagactttaacccaattgataccgaaagaagtgacgtacattgaaaatagcaggctaatttatctgataactcgattggaaccgactgttcaccattttgtggaccgtttatttctgatgggtgttaaggtagcctgcgtttattttcaagtcgcccacgcttattcgacttgttaaaaagacgcccatcagcgcgtctttttttgcggccttaatcccaatcagccaatcgcctgaattaattgatgaggtgatttcaatgggcactatccaactaaccaatttaacatttaactatccagatcaagtcgaaccccttttcaaccacgtgacgctcaaattcgatgccagctggcgactcggtttaatcggccggaacggtcgtggtaagacaacattgctcaaattattacaacgccaactcccttttgaagggcagttaaccaccgatttagattgccaatatttcccccaaacaatcaaggaccccacttggctaacacgcgatattttaatgcagctcggtcatctcgatgagtccacgttttggcaaatcgaacgtgaattacaaggcttacaagtggcccccgagattgtttggcaaccgttcaatacactcagtcccggcgaacaaacgaaaaccttgctcgccttattattcattgacgatcagcattttcaattaatcgacgaaccgaccaatcatttagaccaagaaggtcgcgcagttgtggcgcaatatttaaaacgcaaaagtggctttatcgtcatcagccatgaccgccattttttaaaccaagtcatcgatcacgttttagcgattaatcgggccgacattaccgtgcaccaaggcaattatgagacttggcaaaccgcttatacccaacaagaacaaaccgaaatccagaccaatcaccaactgaatcacgacatcaaacgcttgacccaaaccgcacaacaaaaggcgcaatggtcgcaacaagccgaacgcggtaaaaatgccgctagtgtcaaaaatgaaagtgccaatctggataaaggctttatcggtcaccgcgcagcgaaagttatgaaacgggcgactgcaattactaatcgtgctgaacaagccgttgacgccaaacaacagttactcaagaacgtcgaaatcgctgaaccactgaccttaaagccattaccgctgcgcgcacaacaattcgtgttacaagcgacagagctcaccttgcaggccacaccaaatgtcccactcaaccaacccttatccttggtcgtcaaacccggtgaacaaatcgtggtggccggtcccaatggtgcggggaaatcgactttcattaaagccttgttggctcttcccgccacaacattgattcatcatgggcaactcgaacttaatcaacaattgaaaatctcttatttaccgcagaattttgaccaattagcgggctctttagccaattttgcccttgaaaaacatgttgaacttgaaccactacttggcatgctgcgtaaactcggtttcgatcggcaattattttcgcaccggttagaaacgatgagcatgggccaaaaacgtaaagtcgcacttgcgcgttcactctgtgaagaggcgcatctttatctttgggacgaaccgcttaattatttagacgttatcacccgccaacaagttcaaaccttgattgaaacccagcgaccaaccctattgttaattgaccacgatgtcgatttcgtcacggcggttgcgacgcggacttatcaaatagaaccaattgagtgctcacacccacggtttgattctgagcattagcctagttccgtgaataagtccggtttatgggcttgtttacgaaacgtcgctaagcacaggaatcagtgggtgttggcacgttatgaatgcagaatgttcgcttaacctaaaatgaccagttatcttaagttcaagataactggtcacttttttgtttatactcagaagctaaccagctgagctagcaactctgttctgaaacgtgctttctcagccaacttcttccgtctagctacgaatcgcaaattatgactaatcccagtcataattcacaattctaggctatactcagaagctaaccagctgagctagcactctgttctaatctaatttcttttccaattcgttgacgatttcagcgtgtttggcttctgttaatttaattttggccatgaaaatcaaggctgacacaatcaataagaccattggaatgaagaacatatatgttttgaattgtaataaaccactatttgtaatatcactgggcttcgcattaccggtcataccagcgtgaatggcagcagtcccaaccacaccattggcgaaagcgccggccaatttatccaataatggacggactgccaatgtgacagattcattccgcgtaccactcttcaattgaccgtattcaacactatccgtgatcgtcatcaaagcggctaagaagaccattgggtatgggaagaagaataacccaatggcgattaaaacaacgactaagttgcttccagcaaataagaagagaatgtaccccaacaacatcaaggcaatcccacctagatagatggcccgacgttgaattaaagccactaacgttgggaataatgcaacagagatcacacctaagatcgccgtaatcacgccgactgttgtaaaggcagccgcgcgacccatcacatatctgaagtaataaattaatagtgaattcgtaattacataactaaatgcgaacaagaaatatgacactgataaccacattaattgatcatttttaccgatgactttgaaaacatcacggaaacgaattttttcggtgttttcacgaatcgcactcttttcttctttagtccctaaaatggtggctaaagcgcctaagaatgacacaatcccgataacaacggcgaaaccgaaccaaccagcaccagtttgttgactaccgtgtgtgccagaaaaaatttgtgagaagaagacgaccattggcacgatgacaataatgacgccttgtgcccctaaagttgacccaaaacgcgcaattgcgccaaacttcgtccgtttttctgaatcaacgcttaaagcgggtaacattgaccagaacgaaatatctttaaatgaatagaaaatatctaaaatgacgaaaacgattccaaataacgtcaagtaaagataagggctcttagtgttcaagccaccaaaattcgtaaagattaacgctaaaccaattgaactgataattgaacctatgagtagccaaggtttaaatttaccccagcgagtccgcgtattatcaacgaccccaccaattaatggatcaaaaacgatttcgataatccgaatgacaaccatcatcgaagtgacataaccaatcatcttcgcgttgaaagccgcattattggtatcgaataattgactcgtgacaaaaatcataaaataagtgctgagtgttgcgtaaaaagcatcgtgtccaaaagccccaaaggcgtatgaactgtattgtttcaaatctttaaatttattcataataaactcctttcaattgagcgattattggtaacgacgttcgataattttttctaaaatggcttggcgttgcttttcttttgctgaaccaaattgattttcttctaatgaattaaaatccttagctaataaaacagattcaaggtaaagcgttaattgacgcttgatgtaaaccttgttgtcttcattggtttgcttaggattccccgcaatgatggctgatgcaaattgatcagcatcaatgataattttattctcgctcattctaaccgcttctttctctcttaatatattccatagactttaagtaaacgtttacttgtccgttaaatcagtgttatcaagttattaagcttgataatgtaaccgtattcctaagtcagtaattctattttactaaaactttactaaaatgtaaacgtttaattttatttatatagcgttttctcatttttgaaacatgtttctttttttaaatattttaaagtaattattgaaatttagtttcaataatgctatatttatttctgaggaaagcgttttaatttagaaaggagatcaactatgcttggtttttctgtttatcttaatcaaccaattgacgatttaattgccaataattgtcttcatatgcagcaatctggtttcactgaagtctttacatcgatgcatattccagaagacgacgttacattatatttaaagcgcgttcaggcactcggccaaatctgtcgcgagaaccatttagatttaatgattgatatcgaatcggattcattagaacatatcggcctttcattagataacccacaagcgattaaagctttcgggattacggggctcagaattgattttgggattagcaatcaacaaattgcgggactctcacaacatttaaaaatcgcgttaaatgccagtaccctttcagaatcggatttagtcgctcttaaaacggcgaatgcgaatttccaaaatatggaagcttggcataattattatcctagaaatgaaaccggtttagcgcgtgactggttcattcgcaccaatcaatggttaaaagagagcgggtttacaacgcaggcttttatccccggtgacggtcaactaagaggccccattaaaagtgggttacccacacttgaagaacaccgtggtcaacatcctttggcctgtgccttagatttgttagccctctcggtcgataaggtcttcattggtgatccccaactcagaccagcaacactgatgcaattctcggattatttccaaacacagaccatgacccttcattgtgttcgtgaaaccaatcaattaccggactacttgttcacgacgcaattccataaccgtcgtgatgtcgcgcgcgatgtcattcgtttagaagaaggccgtccgctttgcaaaagtactgttgtgccactggcctgcgcgacacgaccaattggtagtctgaccatcgataatttagattacggtcgctatatgggcgaattgcaaatcactaaaacaaacttacctggcaatccccaagtcaacgtacttggcaaaattattgattcagaacttcccctcttaccatttattctggctggacaagccattcaactaaaggagcaattataatatggacttaagtcgtttaactaccgaaaatcggaatcaaaaaacaatgaacttagatgaattaccggttcatgatgtgctacaactcatgaatactgaagatcatggtgtaccagaaggcgttcaaaaagcactccctcaaattgaagcggccgttaaagccatcatcaatagcttccaaaaagatggccgtctcatttatatgggcgctggtaccagtggccgcttgggcgtcttagacgcggccgaatgtgtgcccactttcggaacagaacctgaaatggtccaaggcttaatcgccggtggtatggctgcaatgactgttgccgttgaaggtgctgaagattcagccgctctaggccaagaagatttagtggccattaacttaaccgccaacgataccgtcgtcggcatcgccgcaagtggccggacaccttacgtgattggcggcttagattatgccaaacaagttggcgccgcaaccgtcagtttagcttgtaactttgacgcggccatcagtcaacatgctgcgattaatatcgaagtcgaagttggcgcagaaattttgaccggctcaactcgcctcaaatcaggaacggcgcaaaaattaattctaaacatgctttcaaccgcttcaatgattggtatcggtaaagtttataagaatttaatggtcgacgttaaacccactaacgaaaaactcgtggaacgtgctaaacggatcatcatggctgcaacggactgttcttacgacgttgccgcacaacaatttaccgccgctgatgaaaatgttaaattagcaatcgttatgattctcactgatttgcccctcaaggaagccaagctaaaactcaaacaagctaagggtttcgtccgtcaaacaacgcattaaaaaactaactatttaggagatattgccatgtctgagaaaaaagaagttcgtttagctagagagatttatgctgccattggtggcccaacaaatgtcgccaaattgattcattgtatgacccgcgttcggatgacgattaaagacgacgctaaagttgatatgaccgctcttaaagcgatcgacggcgtcttaggaatcgtcgaagaagatacattacaagtggttgtgggccccgggatcgttaataaagtcgctcaaatcatggtcgatgaagtcggcgttaagttgggcgacccattccccgataatcaagcagcagaagttgatcaatcagcaatgaccgatcgcgaaaaagtcgaagctaaagccgccaaagttaaggctgctcaaaaagccaaacaaaaaagcacacccgttaaacgtgtgctgaaatcaatttctaacatcttcgtacccttaatccccgcctttgttggggccggtttaatcggtgggattgcggccattttatccaatatgttactcgctggttcgcttggcactaactggacagaattcgtcaccatcttaaacgtcattaaaaatggtgtctttgccttcttagccgtttatgttgggattaacagtgccactgaattcggggcaacacctggcttaggtggggttatcggggccgttaccttattaaacggtgtcgatcctaaaattccgttacacaatatttttaacggtcaacctttaacggctggccaaggtggtataattggcgtaatcttcgcggtttgggtcctttcaattattgaaaagaaattacacaaaatcgtgccagattcaattgatattatcgtgacaccaacggtttcattactcttaatcggggtcttcacgatttttatcgtcatgccagttgccggtgtcatttcaaactcgttagtcggttcaattaactgggtcctaaacgtcggtggtgccttctccggattcgctctaggcctactcttcttaccaatggtcatgttcggtttacaccaagtcctaacccctattcatattgaaatgatcaataaaaccggttcaacattattgttaccaatcttagcaatggcgggtgccggtcaagtcggtgctgcacttgcactttggattcgttgtcgtaaaaataaagaattaacgaacatgattaaaggggcccttcccgttggcttcctcggcattggcgaacctttaatttacggagtcactttacctttagggaaaccatttatcacagcttgtatcggcggtgggattggtggtgccgtcttaggtgcacttggtggcgtcggttcaatcgccatcgggcctagtggtttagcactgattccgttgatcactaacggccatcaatttggctatattctcggtttattatcagcctacgctggcggtttcgtcgcaacttacttcttcggtattcctaaagatgcaatggaagcaaaataactaaaaaaggaaataatcgttatggaaagtattatctattcaatccaaaaaaaattacctgcgctcactaaatctgaaaaacgactcgcaaaattcgtcttaaccgatccacaaaaggtgacgacaatgacgactagtgaattagcaacagctgccgcggttagccccgcaacagtcgcccgttttggtcaaacgatttgtggcaaaggtggctttccaacccttaaaattcgattatcatccgaaaaagaattcacacaaccgatctatggtgaaatcgaacccaatgattccacccaagatcttaaaaataaactgacttttagaattaatcaaacattaggccaaaccaatcaattattagcgaatcaagatttggaacaggctgctcaattaattaagcataaaccggccgttttcgtttacggcttaggggcttctaatatcgccgccgaagatctccaacaaaaactattacgtgtcggtaaattagtgattcaatccctcgatacccatctgatggctgcggccttaaccgctcaaaaagaccaagccgttctaatcctcatttcaaattctggcgaaaaatcagatgcattgcatttagcggccttagcaaaaagtttaaacattcccgtcattgtgttgacccacgcacgtgacagtcgactcgctaacctcgcgaccatcattcttcaacatgatgacagcactgaaagtcgcacattacgaagtgccgcaacgacttcattaattgcgcaactctacgtcgtcgacttgctttactacgcctttctcgaacggcatttcaataaaaatgtgtcacaattatccgaatcacatcaagtcattacagacttttttaaataggaggttattcaaatgaaattattttcaaaacgcaaacaaccggtgacgctgaatttgcaagcgattactaacggtgaaatcatgccactagaagccgttgccgatgaagttttctccgctaaaatgatgggcgatggttacgccattcaaccgacggataacagcatctatgcaccggttgctggcacaatttcaagtgtcttccccaccaaacacgcgttagggattacgactgacgatggtcttgaattactgattcacatcggtctcgatacggtcgaactcgctggccaaccctttaacgttttagtcaatgaaggcgacatcgttaaagtggatcaacccttagttgatgttgatttcgcagccatcaccaccgctggtaaaggcacgacatccatggtgattatcacgaacatggctgcgattaaaaccctaacaccccccaacgaacaaaccgtccaacacggtgatttagttcaaacaatctcgatgtaaccaaaaataagctgtgacagaactcggttatcaagtaaaaaaatgagtatcctgaatttaggatactcatttttttgatttgaacggaaattgatgagttatggcacgcgtcaataaaacatattcgtttaatatcagaatacctagacttatatcagcgatggctttttgtttttgactcagttctcaattgtttcacacgaaacatcaatcttacttaatctgttttaaagcctctttttgtgccaaactggctagctgatgagtcgccacaaattggcgtacccagtcagcatcagtcttggcgtattcacgaagcgcccaaccaatcgccttttgaatgaagaattcatcagttgcttgatcggcctcaatcgcttgggttaaatgcattaaacgtgtctggtttttaaaccctaactgcaaaatcagactaatccgtcgcagccaaaagttatcgttaccggcaaaaagcgcccagataacgtcaaactgttcgggatgtaacttgatgtattcgctatagagtttgcgccaaatatcaatcgtgtcccaccaagctttatcggtcacgaccgctaacaagtcttgtaaatctgctagttgccatatacgcttggcccgaaccgctaaatcaatcgctaagtattgatattcccgggcttcttgtgcataaagttggcggattaacgccaacatttcagtcgctgaataatgtttcacagctgaccaaatatcgcgttctaacaaatgacgttctggtgctttgacgccgttgaacttaaattgatcctgcatataacgggccattgcgacttgattttcaggatgcagtggcaactcaatcttaatcatgtgcagccactaacagacgcatctcagtcaccactaattgtagtacgggttggtagtctttcaaagcctgattaacgtcattgaactggcccgctgcattaaacatctcgggtgcgatactaatttgcggattcgtcgctagattttgcatgtgtaacccttccgtcacgagcttcatggcaatcaagctttgaaaaccaccgtgaccaccatacggcataatgctaaccggtttgtttgcccattctcgataaagataatcgagggcgttctttaaaacggccggataaccccaattatattgtggaaataataagacaaaaccatcgtattgactgactaattgactccacgagcgagtgtgggcctgttggtagtcacctttagccggaatttccggttcatctagaaatggcaaatcgattgtcgccaaatccaataaatcaacctgtaaatcggccgattgcagttgttgttgcgtccattcggcgattgagcggccaattcgcttcggacggttcgttccgataataattgcgattttatgtgttgtcattttatttgctccgttcatattgattcacttgaatacaaagcgtattataaacttaatcaataaattgtcatgaataaaaaagaggtaatcatttgtcactcatcaacgatctgattcaaacattaaatcaatttatcagcgctgaccggcgcaacgaccaagagaaacagtgggtgcaagcccaggtcaccgattccaagctccgtcaattgctgacgcgtctatcgacccgcgatattaaaatcatcagtcagattggccaagaagcaatctgttatatcaaaacactacccacagccgtcaacgcgtcccaagctacgatttcgcggacgatttcgcgtttggaaaaagacgggcttgtcgccaaataccgcaacatcaataatgacaaagagttactcgtccgtctaaccgaaattggccaaacaatcgctgagctccacacccagttagatcaacaattggcgaccgacctcgagagcatcgcggccgattattcgccggaagaactccaacgtttcaccgaactaatgcagcggattaatcaacatcaactaccggcaattaaataagaaaacgtcgcattccatatttggatgcgacgttttttagtgaatcactttaatcaacaatagaccaccaaagataattaacagcccgtaaatgtatttaaccatcgtggtcggcgcaatcttagcgctaatccagttgccgattggaatcacaatcaataatagcggtaaactaagcgccaataattgaagcacttgcaccgtccaaaaaccggcgaggatatgactcgccaccacaatcgtgccgacacaaacaaagtgggcttgtaaaattccgcgtaattcatcgaccgaccattttttaagtgtgccataaatcacgaccggtacaccgtggctattgtaggcactgcccataattcccgaaatcagccccgctagataatcccactttgggctagctaaatggacttgcgccgcactttttcgaacgagattgtacgtgccataactgattaaaaagagcgctaaggcccctaagacaatcttggttggcacccatttcatcaccgcaatccccactggcacccccaataatgaccccagtaccaaacgccggaccaccgctaaatcaattttagtccggtaacgaatcgccgcgggaatcgccacgattaatccgagcgccccaattaacgcggtcgccgactgtaaatcaaacgcaactaacgccaataacggcatcgtgactagtgcttcaccgaatccaaagaccgtccgggtcaaagcgcccaataaaacaattaaaataatgatgacaatcgacatctatgactccttaatctggggattgaccatgccaaaaacatagtgcggcatcgtcataccatagtagtgtttctcaatccgatcaaggacctgcatcccgttacgaatcgccacgttcatcgacgctaaattattatcgcgaataatcgaataagccttcaattgatcgaacgcatactgcttaaccgcccgtgcggcttcagtggcgtggccttgatgccaacaatcacggcggaataagtagccgatttctaacacggtttggtcacggacttgctgcggggtcagcccacattggccgattaattcgccactctcttttgagatgacggcccacaaaccgtacccgaattgcgcgtagttccccagttgtttatccaaccaagcttggacttcttcatctgaaaaagcatgttcgtaagcaaacatcgtcgcttcatcttgtaaaattaattttaaggctggtaaatcagcttgcgttaattcgcggaaacttaagcactcagtcgtcgtctcaatcacgtttaatcctccgtcatcgtttgattccataattgtttttgataatggccagcttgcccggttaggattgagagactcgcgttggcgaccattttttgattgcgaatttcggcaaatggcacgcctaataaagtgttcattaaaaataacaacacaatcccgtgagcgacgattagaacttggccgtccggataggcttgattataatcgtcaatcaccgcttgtccgcgagcgagcaccgattgatacgtttccgcatgaatcgcggccgcatcgaataaatcggggtggtggaaataatggtcaaattccggatgattctgttgtgccgcgactggctgtccttcccaatcgcctaacgccatttcctttaagcggtcatcaatctgaattgccggttgtacggcctttgtcggttgcaacaataattcagctgtcgtttgcgcccgttgcagtggtgaactgataatcgcgtcaaacgattgtttgtccaaataagcccctaagcgactagcggcagcttcaccggatgctgtcaaagccgcatcgaccccgccaccgttaaaacactgcgcgcgattaataatcgtttcaccatgtcgtacaaaataaaaagtggtcatctgactccctgctttccgctataatcctgatacttattatacctgattttgggcatcatgaaatcaatattaagaagcggttctgccaaataccttcataaaattgaatcgttgcagctgccgataaatactgattatcaaaggtcgttgtcatttgagattgcatttgcaactggtaccccaaatgatgagcgactttaacggtagtatcgatgcaatattccgtttgcgccccacaaatttctaacgaagtcacttgtttctggtccagaatcgtttttaaagttgttttaaaaaaagaatccgcgtgtgttttctgaacgttgatgtccgttgccgctgtttctaaggttgggataatttgccaaggcattgtcccggcaatcaattcttcatcattatgctggataaaaataatcggccgattagcctggcgataatcagttaaccgttgattaatttgtgtcaccaatccatcgagatgatcaatcggacccgcaccctgacaaaccccattttgcatgtcaatgactaataaacaatcggctaattctgtcatttaaatccctccaacacttttaaaattagtataccatcaaactttttatcatttaataactttttcacatgaaatcggcttaaaacgcccaaattagtggctaaaagcgttatactactagtatcaaatcgataaggagtgttctaacaatgaaaaaaccaatcaaaggttcatgtacgacggttctcgtcggcaaaaaagcgtcaattgacggttcaacaatgatttctagaaatgatgacggtcatgaagcgttagaccctcaacgttttgttgttgttaaccctgaagatcaaccacgcgactaccaagccgttattagcggggttcaaattaaattacctaacaatccaatgcgttacacatcgatgcctaactcacttttgaccaacggaatttggccagctgctgggattaatagcgaaaatatcacgatgtctgcaactgaaaccatcacgactaaccctcgtattcaaggcctcgatccttttgtggccggcggaattggcgaagaagatatcgtaactttggtgttaccatacatccatagtgctaaagaaggcgttgaacgtttaggcgcaattctgacagaattcggcacttacgaaccaaacgggatcgctttttctgaccaagatagtgtttggtggttagaaactatcggtggtcatcactgggctgctgttcggattcccgatgacgcttacgtggttgcccctaaccgcatgaacatcgaccattttgactttaattcagctgatacactttactcagccgacttaaaagccttgatcgacgataataacttaaatcctgatttaaacggttataatttacgccacatttttggtagtgcttcaatcaaagataccgtttataacaaccctcggacttggtacggtcaacaatattttaatcctgaaatcaaacaagatccacgcgatcacgatttaccattcatctgccacgctaatcgcaaaatttcaattgaagacgttaaattcgttttgagttctcattttgaaaatactgaatacgatccttacggtagcgcccctgaagacgttaaaacgctcttccgcccaatcgggattaaccggaaccacaacgtgcatattcttcaagttcgtaacaacgtgcccgctgaaattgccggggttcactggttagcttacggtgccaatacgttcaacacggtcgtcccattctatgccaacgtcaacgacacacctggctcctataaagatgccactggaacttttgacctcaacaacatgtactggttgagctgcacgactgccttacttggcgatacgaattacgatttctatgtcgatatgcgcaacaccttcgaattagaagccatgagtgcttatcacgcaatccaaaacgccacagacaaggcttttgctgatcataaagccgatgcaacaagcttcctagaagccgccaacgctaaattagcaaacgaatcattaacacgccaaacaaaattattaggcgaaatggtcatttcaggttcagaacatatgaaactacgctataacctaaacgattagagtgctgaactcacgggttgcttctgagcattagcctagtcgggtgaataaaggcggttttgcctttatttgcctgacgtagctaagcacaagaagctgtgagtgcaagcacgttttcgtaagagtgctgtgagttgcggtcagcaactgagcattaattataaataaccggtaatctcgttcttaagattatcggttattttagattaagcggaaattgttgcaactcaaaagcacattttgattagagtgctgactcaagtcataagtaaaaaaacgggctgcaaatttgcagctcgtttttttttgatcgctatttttgtgttactaatcccgcataaatctggtcgatgttccatttcatcatcgtgtaataggtgtcgccggttgtcccttttttcgctaaggaatcggtgaataatttagcgaatactggaatgcccgtttctttggcaaccttatccatcgatttcggtgagaccgaggtttcaacaaacaagctatgaaccttggccgctctaatcttcgctaagacggctttcatctgttctggcgtcccttgcgattcagtattaatctcccaaatataggccggctgcacgtgataggcttgaccgaaatatttaaaggcgccttccgaagtcactaataagcgttgttgttctggaatcgccaaaaatttcgattgcgccgtggtgtgcagtttttgcaatttagcaatataccgatccgcattttgttggtaaaaggccgcattcttcggatccttatccttcaaaaccttggtaatattttgaacgtaaataatgccgtttgctaaatccaaccaagcgtgcggatcttgttctttaacgttggtcgttaaatgctggaccttgataccatcactggccgcaaaaacgtcttcgtcaaactttttatgtgaagtttcaacgagttttttaaaccagccattaccacccgtttccagatttaagccgttgtggaaaatcacatcggcatccgtagcttgcgtaatatcactcggttgcggttcgtattcgtgcggatcagtcccacgtttaacaatactatagagttcaattcgatcctgcccgacttggtggaccaaatcttccaaaatcgaattggttgtgacgacttgtaatttttgggtggtcggcgcactcggtaccgtattgcgctgattcagccagcaataaacgccgctgaccatcgcgatgacaccgacgaaggtgattaaaattcgtttcatttagttggctcctttgcacttggtcgccatttgaggaaaccttgtttgggggcgactaagaaagaaatcgcgaatagaacagccgccatcagcacaatcgctgggcccgatgcccaattcaaggtatagctgaaatataaaccggtcgtggctgagatcacgccgattccggcggataaaaagagcatcgttgcgaggcgttccgtccataaaaaggcggtcgccgccggggtaattaacatcgcaacgactaagataatcccgaccgtttgcaacgccgaaaccgtgactaacgttaacactaacattagtccgtaatgcaatagttgcgtttttaaaccgtaagttttcgcgtaagtttcatcgaacgacgtaatcaataattccttgtagaaaatcgaaacgaataagatcactaagcctaaaaccaccgcggtcgtcatgatatcactatcgctgaccgccaaaatattcccgaataagatatggtgtaagttcgtcgcactttcagccatcgaaatcaggataaaacccagcgcgtaaaaagcactgaagacaatcccaatcgacgtatcggttttaactttactattggcggcgacaaagccgattaaaacggcggctagaatcccgaaaaccgaagctccgaataagacgttaatcccgagcatgtaggccacggcgacccctggtaataccgcgtgtgaaatcgcatcgcccattaacgacatcccgcgtaagataatgaaacagccgacaatccccgacatcaccccgaccataatcgccgttaacaaggcactttggagaaaatcatattggcctaaagcgctaataaaatcatgaattgaggtcatttagccacctcctgatctgtttcaaacaagattgctgatagatcctcactgaaagcctgtgccatattatcagcatgataaaccgattcaaccggcccataagcgacaatcccgtgattcataattactaagtcatcaaaatactgggtcactttatttaaatcgtgatggacgacaataatcgttttaccggcatcgcgccaagctttcatgatggtcataatcgccgtttcactctgtaaatcaatcccaacaaatggttcgtctaagataataatatcggcttcttggacaatcgcccgcgccacgaaaacacgttggagttgcccgcccgacaactggccgatttgccgtttcgcaaacgccgtcaatgagacctgttctaaagccgctaaactagccgctttttcaactttaccggggtttctcaataagcctagttggccatacgtcccggtcaacacgacatccaaaacgttgatgggaaagttcaaatctaaatctttgcgttgttcaacgtacgccacgtttttgcgaacctcttttaagggtcgctggttgtaagtaacttggccttgttgtgttttaatcaaccccagtatcgctttgatcagggttgatttacccgcaccgtttggtccaatgattccagttattttgcctgcttcaaattgaacggcaacatcagtgaagactggtgtgtcatcgtaagcaacggtgaggttcttaattgttagcataaagagcctccatccatttttaggtaaacctaacttattaccttcatcatacattattttagtatcgataacaatatttttaggctaacttaattttcgccaaacctgccttcttttaaagaatatgttatgctagtttgtacgattatttttagtaaggagttttaagaatcttgaaatcaattcatttaaaatggctggaatatctgaccggctttatcttcattataagtatggtcgccatcgctacttggttagacgatgtcgaaattattttaccggaaatcgccgctttgacggctggtctatggctttatcacgaacccaattgggtggccaatcccagcaaaatatttatcatcccgtcaaccaccgcgattgtcggttttgggattaacttattaccgtggacctatcccgaaaaaatcctattattactcggcttaatggtcggttttctaagtgtcatgcggtccacattagcgccggcgtttgcgactgggttactgccgattatcgtcaatgcacgtcactattcatttattatcgcgattttagtgttcaccttaatcttaatgttggccgttcaattccggcaactcgcgacccgcactgccgatccactaccgattaattaccgcgcgatgctcgtctttttaggtttagcggtgatttgggtcggcctagtcaccttagccggtaaaccacagatggcggcgattccgccggtttttgtcgtctttttcgaagtgttacaaaaaccaatgtattctggtaaaatggccgttaaacaagtgatcgccctcaccggggcagcgacgattggcgtcgtggcttacagcttaatcgattcgcgtttactagtgactttaatcgcactcccgttagtagcgctcttactttggctattacgggttaaaatcccggcggcctatgctttcccattattagcaatcatcttaccaaccacgatgttccacacactgcccctgaccagtttgctagccactagctatttcttcggcggcgcttatctataccatcggttggtcaagccctattttcaacaaactaaagcatccattcattcatagaaaagagttcctttaaaatggcaaccttccaaatgagtttcatcttaatcttgattggcatcgccgcgggcatcgtcagcacggttggcggattagcctcattagtttcgtatcccgccttattagcgcttggattaccacccgtcaccgccaacgtgaccaatacagccggcttaattttcaccggcgttggggccactatcgcctcgcgtaaagaattgaaacaccaacgtcacgagttgctgacactcctgccactaaccttgattggttgcgtcgtcggtgcgttactactctttaaaattcccgcgacgagtttccaaaaagtggtgcctttctttattttatcggccggcctattgatcttgattccgcgccatctacaagtcaaacaaccggctcagtggcaagttgttctcgcttggttcggcgtcttcttcgtggggatttatagtggctatttcggcgccgcttctggcgttttaatgttgtccctactctcgatcattagccaagcgcgattcactgaatacaacgctactaaaaatctgattatgggcctagccaactgcatcgcaaccttaatctactacttacaaacgacgattcaatggtcgctcgtttggccgttagggattggctttttattaggcggtttaatcggtccttcgattgtccgcatactccccgaacgctggactaaaattggcatcgggattgccgcaattggcctagcgattagtttatttgtccaagcttattaactaaaaaacagtgcgtgatcaccgaatcatcggtaatcacgcactgtttttttagtttaaaatgattagttaatgttctaaacgcgcttctcaagtaggcttttccggttaacgacataacggaaaccatgggtaaatcgcccataattcccgttattaggttaatcctcaaagcctgaccaacttgagtcagcgctctgatttgaaacgcgttccttgagcaaacctttccgcctagctacaaaacgatcctgatggttaaaatacaaaccatcagggtcgtttctaggctatgctcaaggtttaatcgctcaagtcacgctctgatcaaattgtacttttcgccgccattaacaacagtcgtttaaaatccgtttgttctttagtcgtcatcgtttcggtcatgcgttgaaaacagatatcgacttcctttttgacggatggataaactgcccatgctttgtcagtcggttgaatgtcgtaagttcgtttgtctttcgtatttttcgtgcgaatcaaataacccgtttcttctaatttcaaaaccgttttggcgacgacacttttgtctaagccgagtcgtttggtgatcccatcttgggtcaaaacgccaaaatcacaaacaatcgaaatcactagcgcttgggcggcggtcaaagaatattgcgcacagccttcatttaaccaaatatgcgatttgcgatacaaaattgaaatggctttaaagccgctatccataatatcaggcatgtcagttggcctcctcatctgttaccgttattctaactaaatatagtggcatttgcaactagttgttgacgtccaaaaatgagtgtgctaaattaatatagtggcaattgccaccttttttaattttaaagaacgggaagttaaacacttatggaacaaaccactaaaatttggaacaaacagtttattttactattcatcaccaacttattaatgatggccgccttttacgcctcaattccgattattccgatttactgtcaagaacacggcattactgggatgaaagtcgggattgttctaacggcgatgtcgctggcgaccattatttttcgaccaattgccggttatctattggataacttcaatcgctaccacgtctatttattatttctcggactattctgtctcgctttcccaagtttcattctcttccccacttttggcgcactcgttttaatccgtttatacatggggattgtctattccgtctgtggttcggccactatgacgctggccggcgatgttttgccgcgtgctaacgtaaccgccggcatcagtcgctttgccttaacgatttcgattgggatggcttttggcccctatatcgggattcaagttcaaaactacgtcaacagtccaactgcattcttaattatctttgcaatgaccgtcgtggccttcatctgtgtttgtgccagccatattcaatatccaaaggtcactcgcaaaaagtttgcttttagagatacaatttacaaaccagccttacctttcatgttcaacatgatgttcctcatgattccatttggcgccgtgattgcttattcatccttactcgcccaagacttacatttaacagcaaccattccgtatttctacatttgtttagtgctcggcatgttattatcaaaattttcaacccaaaaaatgatcgataacggtcgtcaccgggttctcgtatacctcagcttagtccttttaatggtcacgatggccagctacgccttcttaacaaccagtctgcatctgttaatcgccggtttcctattcggtttaggttacggtattctccaaccactcttccaatcctttgtgactggcaccacacccgcgcccaaacgtggcgttgccaatgctacttacatgctttcttatgatatcggtattgggattggctcatttttaatgggcagtctgcaaacctcgattgggattgctaacggttttgcattaacggccttagcctttgtcatcggcggcgtcatctacgcggtttatgtcgatcgttattaccttaaattgaaaaatcaattgaccagtcaggccacacctgacaatatcgtcaaaacgcatatggagcacgacgtttacaccttaccagctaccgctaacgtccaagaagcgttactttatttctcacaaaaacacattagtggcgccccgattgttaatcaaaatgggcaaccagttggctttatcagtgacggcgatattttacgttatctccgcaccgccgattatccagctgctgcactcgatggcaccgccttattaacggtccttttagaaaccgatgttgattttgatcaaaaattggcgaatctaacgtcgttaagtgttctagaagttagtacccgtcagctcattacagttgaccccaccgcttctttcgaaagtgtttgtcagctgttaagtgctaaaccgattaaaaaagtgccagttgtcgaaaatcataaaatcgttgggattatcacccggtcgaatattaccgattatctaacccaacgctatttttttgaaatgcgcttctcgagtaatcttttccggttaacgacataacggaacccatgggtaaatcgcccataattcccgttattaggttaatcctcaaagcctaaccaactcgaatcagcgctctatctgaaacgcgcttttgtttgcaacaacttccgcttaacctaaaatcaccaattatcttaagttcaagataactggtgatttttgttaatgctcagttgctacccgcaaccaagttaacgctctaaacgcgttcctgagccagcttcttccgtctagctacgaatagcaaatcatgactaaagaaccagtcataatccgctactctaggctatactcagaaactgaacagctcagtcacgctctgctctgaaacgcgcttttccatgcaagtttctgtgcttagcgacgcttcgcaaacaaagtccaaaacctggactttattcacgaagctaggctaatgctcaaaacttaaccgcatgtcattagcgctctgctcttattctgatcttaatgcgattgctgcgtcttttttcgctgccattctagctggtacgtggccgcctaggattgttaagactgtgctgacaatcactaagacaatgccgtggactgggtttaactgcgagacgttggtcaagccggttaaattctctaggatgacgttgattgggaacgtgcataaccacgcgaccacaacgccgaagattccggagcccatccctaagatggcggtttccgcatcgaagacgcgggtgatatctttcttacgagcacctaaggctttcaagaccccaatttctttggtccgttcaaggactgacgtgtaagtgataatcgcgatcataatcatcgatgtcactaatgaaataccggcaaaagcgactaagacgtaagtaattgcgtccatcatgcctccggttaatttcgaaacttggccagccatatccgtgtagataatttggtcggctttctttttacccgtattgtatttgtctaaataatccaacacttgatctttcttcttgaagttggttgggtaaatttggatacttgatggcgtttgttcgccacctaatacagttaacatttgtgttttagtcgtagcatccattgccgcaccagtcatcacgttagtcgtgctagcggtttgggcttggacaattgctgactccttatttgcgttataaacttctttggttaattgatcactataaacgacaccactcgccaatagcccgtcactatttttcgatttaacccgtaaaataccgacgacgtttagctctttggtactgctagcagttgccattgacgcataatcttggcttggtataaagttgccagttggtaatttttggtagaaactgtcattgttaaccagtttgattgacgtgccaatcaacttattgtaatcaatcttctgattgcgtttagcgtcaatccctaagttcttcaacgccgataatgtaatgttattttggcgatcaacgactaaaatgacatccgttttcttcgttgggtaacgacctgctaacactttatagttcgatttcaagaaactttggccaccgttacgatcgattggataaacggaaccacccacaccggtcatgctcgccatcatcgctgaggcatcaatcgttgaggcgccggcatcggaattgctaaacttcaccgtttgccacttgccgtcgactttacggattaaattcatcccagtgctgtaagaaatcgcaatgtttttagcgtctttcttcggcatcttttgaacgtaatcaacgtatttagtcgtcaacttgttgatgtgttgcgtcttttcagactgacttaaatccgctttgacgtatttgcctttcgcaaagcctttactctggccgctcatcacggattgggtgccggaagcatcagaagcgaccgccccaattgagaccggcatcgaagccatcgtatcttgttgtgtttgatcaatttgtttctggaaaccattcgaaagcgccaagacaatcgcgatactgatgatcccaattgaagaggcaaagacggtcaagaatgtccggcctttcttagtcatgatattcttaaacgacaatttcagagccgttaaataactcatctttgtgtgtttcaattcaaaattattggccgtatcgtgatcttcatacgggtttgaatcggtttgaatcttaccatccgcaaattcaataatccggtcggcgtattgacgcgccaaggttgggttatgggtgaccatgacgactaatcgttcttcagataactctttgatcagttgcatgatttcttcggatgtttcagaatccaaagcgccggttggttcatcggctaacagaatttcaggatcattggcaatcgcccgcgcaatggcgacccgttgcatttgaccaccggataattggttgggttgtttgtgcatgtgtaacttcaaaccaacccgaactaaggcgtcttctgcgcgctttttcttttcagccgcatcgacaccggaaagggtcatccccatttccacgttatcaataatcgataaatggccaataatgttatacgattggaaaataaaaccgaccgagttattccggtaagcatcccaatctgaatccttaaacgtatcggttgatttaccttcaataatcaggttcccagaatcataacgatctaggccaccaatcatatttaacatcgtcgttttacccgaaccagaaggtcccaaaacggccacaaattcttgttttctaaacgcgactgatacgtcgtccaatgccttagtcgttgtttcgccaacggtataatatttctttaaatgctgtaattcaagcaacccgttcacatccttcacttaagttatttccaattataataaacatttaacaattgtcaataattgattttaattaattatacctttatactgatattattcgcaacaataaaggagcaacgttatggctgaacctagtttcccacccaacattgatgcactccccgctaacattaaagtgctcgccaccttattttcaacgttagcgcaaaatatttttcgttttattaatacagaatcgtccgatttgacccctttaaattccttaatcgtctgtaccgtcgcgtgtcatcccggcattgcgatgtccgatttagccgaccaattagggattgctaaatcgcaactctcgcgcaatgtccttaccttagaaaagctagacctcgttgaacgccgacataataccgataaccgtcgattggtcaacgtttacgccaatccagccggtaacgccatggcccaagcacaagttttaaaagtcgcccaacatctaaacgggttactggataaactcgaagcgcccgagcaacaacgactagatgtcctactaagtgaaaccttggcaattttagccaaagcggatattgtcccgattccagtcgaacaacttaaaacggcggccttacaacgccaatctaaataaccgacaccccactcaaaaaaatgagctggcgtcggttatttttgtggtttaacgccggtactcatcacaaatcaaggccgccatcttttgaggtgtttcttggcaatcgttgcgtaaccattcgcgcgcaaccgcgccaaagcccgccatgaaaaattgcaaatggtaatgccgttcgtcatcaacgtagaactgactactgggagctggcataatgggcgcatctggcggcgtaaaatactgatgatccgtcaaataaatcccgtaaaaatcgcggtgcgattggataaactcaaataattgtgcaaaaatcgattcaatattcgcgtacgtttgtcgatccaacggttttagaatcagtcggatttcctgttgaaacccgttttgaatcgtttcggttaacacgtaaatctcggcgtagtgggcgtaaaacgtcgtccgattgacttgcgccaatgtacataatgattggatcgtaattttattgaggggtttcgtatgaattaacgtcaaaaaggctttttcaatcttatctttagagacttgtttccgttgattttgtttagtattcaccgccgcaccacctttcgcatcgttatccaaatcataccattaatccgacaaaatgaccgattttatcggttgtaatccggctaaataggcgtatattactaaaggccataataactggcattattacttataaggatggtttaaaatggtcaacgaaaaacaaagaacgtcaatttttatcaatattctgattagttgtattgcctcatcaatgctcgcaacggccctgacgacggcgcttccgtcgatggtcgtcgacttccatatctcggtcacgaccggccaatggttgaccagcggctattcactcgcgatgggcatcacgatgccattaaccgcctttttaatcactaaatttccaacgcgtaaactctatttaaccgccattagcctgttcatcgccggcctcgcgctctgcgtggtcgcaccaaatttcgtcgtcttaatgatcggccgcgtcttgcaggcctgcgggaacgggattctgacttcgatggcccaagtcattctactgacaatgtatccactcgaaaaacggggcacgatcatgggttggtacgggttatcaatcggcgctgcaccggtgattgcccccacaattgccggcatcttagtcgatacgagcggttggcggatgattttcatcgccgccatcgtcatcatggcgatttcactcgtttttgccttcatggtctttaaagacgttttgcccacaagtaagaaacatttcgacaccctatcatttgtcatcagcgggattgcctatgccgggattacactcgggattggcaatatcgggacttataaactcttctcactccccgttttatgcccgttgattctcggcattttagggatgttcatctttgcgaaacgccaatttaaacgcccagaacccttcttagatctccacgttttacaaaataaagtgttcgtcattagtttaatcggtagtatgttattgtatttcgtgatgatgggttcttcgattatcctaccactgttcattcaaaccattaagggtttctcggcaacgacttccggcttagtcacactccccggttcactggccatgaccatcttgagtccctttgctggtaaaatttatgaccgctttgggatgcgacgcttattcatcgccggcgctttagtcctcttgattagtaatgtgggcatgattttcattacgcttaaaacctctctcatcctaatcgccgcactcaacgtcttgcggagcctggccatcggttgtttgatgatgccgttagtcacttgggggatgagtggcatcgacgtccaaatgaccgcgcacgggacagccttattaacctcgttgcggacgattgctggcgcggtcggttccgcaatcttcgtcagcatcatgagtacagttgctaaaaattcagccgccactttaggcgcacaagcacccatgcacggcgttaacatgaccttcttgttcatgagtttagtctcagtcatcttaatgctcgtcgctatttttgctaaaactaatcagcgatcagctgaataactggttaaaactaacaattcaaaaaacggtctatcctgttgggataggccgtttttctaatttggtccgcaatcaaatcgcggatgttggcactcgattgatacccacggtctgtcacagcttgattttatattattgaatttctaaaatcggatcaaacaacgttaattgattgcaatcaacattgcctaaatcggtgattgctaaatctggaatcgcggtgatgggcaagaacgtcatgtaaaacatcggatccacgacctgactaccgatggcttgactcgcctttagaatcgctttttcttgtatggcaagttcagcgggggtcacatcactgacaattcccgcaatcggtaatggtaagaaacttagaatctcgccatctgccacgacaacttggccaccatcgcgttcaattaacgtattgaccgctagtgccatatcagccggattaactcccatcacaatcagattattatcatcgggcgcggcactagaagccatcgcgccttttttgagtgtccaaccggaagtgaatcccagtgattgattaccattcttaccaaagcgctctaagaccgaaatcaacgcgacatcttgagctggatcgatttggacaatcccgtcttgaactgccaaagttttggttttcgcacggcggacaaacggtccttcactggcaatcgtttgaaccgtcacctgttgcgctgattcagcggcatggtattcgaaatcactggcttgtacccgctcgcgaacgaccgtattcgctaaactagcgggacggactgggcgcaccaatggtgtatcaatttgataatcggttgcaactgggtggcctttcgccaatactttggtgatcttaaattggcttaagtctgagacaaacaagatatccgcatggcggttcggcgctatcagcccaatttggtcatcgacccgatatgcttcggcactattaatcgtcgccatttgaatcgccgtcatcggggccacgccggccgcaatcgctaagcgcactagatggtccaagtgccctttttgatcaatatccatcgcgttaacatcatcggtacagaaactaacatggcgtgcaatttgcccatcagtttcagtgatggcacgaatattctcggctaagaaatgagtcacagaggattcgcgaatcacgacgttaatccctttacgaactttttcgagtaattcttggtgatcataactttcgtgatcgacccggaccccactcattaaatattcgtttaacttagtgccagttgccattggcgcacaaccccaaaccggttgatgattatcttgcgcactcaataatgtttttaacgtatcttcatctaaggtttcaactgcttcacgaacggtttcccaaaccccatagacatccgcacgcttttgtaactgtgcttgaacgtcggaattgatgttatcggcaatcgtcgacgctggaatcgtgtaaggggttttaaacggtgcgccccagaagacccgcatcggcagttgttcaacttctttaaaaatttcggttaaaccggccaccccaatcacggaaatatattcgtctaatcccgaaacgatactcgttgttccgtggggcacaacggcttcagcgaaactggtcatactcaacttgctacactcaacgtggatgtgcccatcaattaaccccggcaccaaatattgttgctgggcatcgatgatttgcgtttgactgccgatataggccgaaacgtcgggatcaaccgcgacaattttaccctgataaatcgccacttcggcgggataaatttcggcggtcatcacgttgacgagttgcccattttgaatcactaaatcggccgggcgtttggcgccaccagcttgaatcaaggctttaaaagcggttaatcgatctgacatctgaatgaactcctttatttcggtaggatattaatgacatacaacagaataatgaagacgaagaataaagcgtacatcgcgggatgaatttctttacgccgacccgcagcaagcatcgttaatggataaactaagaagccaaaggcaatcccgtaagcaatgttataagtcagtggcatcgcgataatcgttaagaaacttggtaaagcaacttcgaaacggccccaatcaatcttgctcaatgagctggccatcaagacgccgacaatgattaaaaccggcgcagtgacttgggtcgtcacaacggtcagtaagggtgagaataacatcgaaaagccgaacatgaccccaaccactaaactggttaaaccggtcttaccacccatcgcaatccccgctgaggattcaacgtaagcagcagttggcgtagtccccattacggaaccggccatcattgaaattgaatcggccattaaagcttggcccacgcgtggcattttaccatttttcatgaaaccggcttgttccgctaacccgattaaagtcccagctgtatcgaagaacgcgactaataagaaaattaaaacaaccgcccataattggggttggttgatgtcgcctagatgttgaatcccaacgccaaacgtcggtttcatgctaggcgcaacggaaattaagtgactgggtaatgaaattaacttcgtgactaagcccaaaatggtcgtcgcaatcatcccgatgaaaatcgcgccgttaacctttttggccatcaaagcaccggtcacaattaacccaaagattgttaaccaagtcgttggcaccgtcaacgagcccatttgaaccaacgttgacttgctggcaacgattaacccgccaccttgcaagccgacaaaggctatgaataacccgattccggcggccatcgccagttttaaatcatgcggaatcgcatcgataatgtattcccgaattttgaataaggtaatcaccatgaatatcacggaagcgacaacgacgccggccatcgcagtttgccacgaaatgcccatcgcaatcacgactgaataagtaaagaacgcgttgtcgcctaaccctggcgcaatggcaatcggataattcgccaagaaagccatcaataatgaaccgataatggcggataaggcagtggcggtgaagaccgcccctttatccatcccggcttcacccaagatttgcggattgacgaacaagatatacgccattgagacgaaggtcgttaacccggcaagaacttcccgtttaacgtttgtgcccgattcctgtaatttaaagacgcggtcggcttgaccacttaatccagataattgttctgctgctgccatttctactcagctcccatttacaattgataagttcagtatgccaaaacattttagataaatcaagaacaatatttctgaaaattaaataatcgttcggttttaacttgaaatacacactaatttccagtatgctatggttattgataattctttaggaggctgattttttgaaaaaccaattagcaacacgtgattttattaacggtttacccaaagcagaattacatttacatctagaaggcacgctcgaacccgaattgaaattagcgctcgcgcaaaaaaacggcgttgatatcggccaaacgacgattgccgaagtccaagccagctacaacttcaattcactcgcctcatttttggccgtctattatccagcaatggacgtcttacaaaccgaagctgatttctaccaattagccatggcctatttaaccaaggcgcatcaagaaaatatccgttacaccgaactcttcttcgatccacaagcgcacatggctcgcgggattgctttcgaaaccgttgtcaacggctttcaccgcgcctgtgtcgacgcgcacgcctttaatgtcgatgcccatctcatcatgtgtttccttcgtgatttatcagcggaatcggcgcgccaacttttagaaactgccaaaccttatcaagccaagattctcggcattggtttagattccgacgaacatcataatccaccattgaaattcctacgcgaatacggcgaagcagttgcccaaggttaccggattacgatgcatgccgatattgatcaagtggattcgattcaacatattcaacaggcactcgagattatccgggttgaacgcttggatcacggcaccaacatcgtcgaaaatcccgacctggttgattgggtcgcgcaactcaaaatcggtttaacttcttgtcccttatccaaccggctagttgccgacgatatgaaggatcaagaagtcctcaacttaatcgaccacgacgttaaagtctccattaattcggacgatccggcctacttcggtggctacatcaacgataactacgaagccatcgccaatgcgaaccaattgacgatcgaccaagtcgtgaccttcgctaaaaattcattcgaaacggcctggattagcgatgttcaaaaagcaacttacctgactgaaatcgacgaatacgttgaaaactatttaaaggactaatcaaaaggcaccgataaccgcttaaattaagccgttatcggtgccttttcaattatttaaaacgcgtctgacaagtcatcttttgtacatctgcgattgtttgacaaccggttaattgcattgcaatattgatttcgttttttaactggttagcgacattccgaacaccttgccaaccacctaaagccaaaccataactgaatggccgaccgacaccaaccaaatcagcgcctaacgctaacgcctttaacacgtgggttccccgttgaacaccgccgtcgaaaatgatcggcacgcgctgatcaaccgcttgagcaattgccggcaacgtttcaatggctgccggtgcgccgtccaattgtcggccgccatgattcgaaacgtagattcccgcagcgccggcttcgattgcagccgtggcatcttgtggtgtttgaatccctttgataataatcggtaattcagaataggcagccaatttatcgattaacgctaaatcaagtttctgcatggattctttaaacaacccccccgcaccaacaccacattgcccagtgttgtagccttcaaggttcgcaattttgccacgtaaatggtaatgattaatcacatctaattctcggtaaccgcctaatgttgaatccgccgttaaaataatcgctttggcgttggcttcccgtgcttcatccaatagatattgacaatacgcccaatcttttggcatatataactgaaacatatacggcgcacctgctgaaactgcggctgtttcggcgattgtctttgatgcgaaggtactctgggccatcatgatgcccgcttctttcgcaccttttgccaaaccaatttcgccactaggatgggctaacgtattgcctgcaattggggccgtcaacaatggtgaatcaagctgaacacccataaactcggtttgttgattgggttgttccaccccgcgtaagacacggggcaacatcttgacatcgtcaaaagcggtcgtattacatctcattgtataaccgtcatctgaaccttcactgatataaccgaattctccaggaccaataactggttttgcccgggcagctaaacttttaagattcaagacatcaatatcgacaactgggccaaataaatccgttttttccttcaacatacttctctcactccttaattcagcctccgacgcctatcggaattccgttaacatcggggtattataccgatccgttttgagaactggttgatcagtcgctggcttgccaagcgagatggccatcactggcacaaaccgtttttcatccaagcctaacgttgggataatcgttttaaaattaaaaccggaccatggattggcttcatagccgtgtgcacgtgcaattaacaatagttgcatgccgaccattgaacaatcaatggttgcatctaaggttaaaaattctggtgtcgctttttcataaagtggtaagaaagtatttaaaatcgtgtctaatttagctttatcaatcttaccggccgcataacctttttgccaaacatcccgataaacttcatgcgatttagtatcgccagccaagaaaatcacggccgagctgctgtcaatttgcggataattaaatttcattgccgcttcttttaattttgatttaccttctggtgtatcaatgacgacgaaatgccatgattgtaaattgcaggctgatggtgcagtcgcagcttgttcaatcatcgtttgtaattcgtcgcgcggaatcttaatacttggatcaaattgacgcactgaatgccgatcaaacattatttttgaaaaatcattattgattaattctgacatggtccattcctccaattatttaaatttgataacttgtggcttgtggttttaaaataccttgatcataccggccagtaatcagatatggcgcgattgcgtctgcgtcaacgtccgccaatttgaccgtttgatgcatgactgacgtatcaaaatgataccaacccgcacccaatggttttagcacttttaattcacctaatggatcatcttccgtcgaattgagtttaagcgttaacttcccgggttctaaacttgaagtcaccgacgtcatctgagtggcgactaattgaacgttggcaaaatgattggaaccatcttcagcttgttcaacatcgtaatcaaagaagaaactcgtgttttcaactggtttattcaacggcatcatctgtgcaaattgtggtaggaaacttggatcgttaatgtcaccggatgcccaatcaacggccaataattcttgtccatgacggcgaacagctgcatgtgcggtatcacccatgcgcgtcaattcaattttatcggctaatttcttaggaatcccagcaccttctcgaccagcgaccatagcagcttcagcgccgggaccgtgcaataacaattcaaacggataagcccccattattttatcttgataggaaacgagtgcgtataacgtttgttcaagatatggtgcaccaaaacttggtttgcccatatgaacgacgtagcccatcacaatcggcgccgctaatttcaatggggccggaatcaatttagctaacatttcgggatcagtcgcatacgcaaaagcaatcccttcttgatcattcatgcttgggttattcagaaattgtttaattaatttgggatctgttacgtaacttgtcatttttaaatcctcctttaaaaataatcaaatattacattaaaccgtccatgacgtggacatctggtgctttatgattcacaattcggttgacccgatcttggattaatggattaaattcaggatgcgtcaaaatataaaattcgttatcttccaacgccttaaacactgtgtcggcaatcgtatcaattggcatcccgttagtaatcacatatttggcgacctgttgccctttggcgaaagcttcagattgataataaggatcttgatcatcgcgatattgagctggtcggtgatcttcagtatgatacagatcagtttggacaaagcctggacacatcacgtgcatttcgatatcggcttccgcgcgttgtaaatcataagcagtcgcttcagttaaaccaactgatgcaaacttgctcgcatggtaggctggcattcctggtgtgtcgattaatccggcaattgatgacacatttaatatcgttccgtgggtcttttgagccatcataatcgggataatttttttcattgtataaacttgagccatcacattgatgtgtaaaatccattcccaatctcgcgttggcaattcccacatgcgaccagccaaagcaatcccggcatcgttaattaataaatcaatttggccaaagactttcatcgtttcatcaatcgcggcattcacttcatcttcttttgtaacatcagccggcaccgtaatcaccgttgcccctgtatcggcaatcgttttggccgttgccgctaaggccgtttcatcaatatccactaacgcgagtttcatgccccgttgcgcacccgcttgtgcgatcacttgaccaaatccgtgagcagcgcctgtgataaacatcactttatctttaaaatctttcattattaaatctccttccacctcaaaatgacgattgttgccgtcgcaccaacctttatcatccgcgatctcgaatacaactttattatagcggttgtatgcgttatcatataggtgtaaataatacactattttgacgaaaataatggttaacttcaacggttgctcatcaattaacaagtaggtttaataatgcatttatcgcaactaattacccgaataagccctaaattgccgctcttaccagaacccagtatcccaaaagcattgatggttgatacggccgctctagcgcccgcacctaatcccgctaacccgacaacactttatttagatcagcacggctttagcctcaatgaaattcgctttagctttacaaccgacattaatgtcttatccgtcttaattgaaatcggcgcggttttaatatctgccactaaagtccaatcattccagaacccactggcgttaacagcaattgccgccgatttcgatattattctacaagccgcagcatctgaacttgatgccccattaattttgctggatttaagtggccaacacattatcgcggcaactagttcgacggtcgatgcccacagtccagtcggtcgttttctggctgcccaagaaccggcactcgatcccaatcagttttatcaacatatgtatctgactaatccaaatgaatcaccaacaccgctattactcaccccaatcgcctatcaaagtgaaccgttaggctatttagcaattgtaacaaccactcccttaacggcacgccaaacccggctactccccgcttttgcccgcgtcattacctgtgcctcaatccgcgataaagtgattgtcaattcactatcacaacgcgatcgtctggtcagtttattattaacagaacagcaagattcgacctttaaacaacaatttgagaatcagggcgccattttaccaactaacatggtgcttataaaatgtgagccaacggccaatcaatcgcttgccactttaaaagctcggttgacttatctgatgatcccgatgtttacccaggtcctcattacaattcaccaccacgcgtgcttggcactggtcaccatcagtttaccggaatacaatcaaccgaattttgtcacccaattgacaactattgccacccggggtaaatgtcgtttgattgtttcaaatttctatcgccatgcaaacgacaccagcgctgcctatcaagtttgtaatcgagcggcgcgccttaaaaatgacgtcaaaccagttttattctgttcagatgtcttttttgatctcatgctcacccaggtcagtaatcgcgataacatcttaccttttttcatcgattctagtctcaaagtattgactgactatgatcaggccaatcacactgaattggtggccactttacgcgcctatttattagcaacgtgtaatttaaccgcgacggctgaaaccttatttattcatccgaacacgctccgcaaacggatgcaacacattacccatttaaccggcctcaatctaaaagatgcgaaaacctgtttcaaattagccgccagtctcgaagtttctcgttacctaatggtcaatcatctcaatcgataatcaccaaaaaaaagcgactcgccaaaaatattggcgggtcgctttttaattggtgcgctattaggcttcaacggcttggcgttggtgtaacttggccatgactgtccgggcaatcggttgagcgataatcgcttcaacggcaaaggcaattgcaaagttccggggccatttttcaaagaaatggataattggaaccatattaaacgcgtggccaccaatccaagtcccgatgacggttaagaaaatcgacatcagaaaaacgttacagagttccgtaataatcattttagctgagaaactatcgtcgtcagccgttaatttgttggccatccattgtgcaggttgttgcgtcaaaacgactaataccacgacacataaccatagccaagggatgacttggagcgttgcgccccaggcttgccatgaaaaaccgacctcaaagcccgtcactaatggtgcgataatgttgactgataaaattgaaataatcccgataaataaaaccatttctttggcgtttctaggtaatcttaatgcaaattccatgtgttaattcctccatcagcgcataaaaaaacagcacaaagcaaggttctgctttgtgctgatcaattatacgcactttttatttaattttttagtagaattatattgtaacaaattttactgaaaattgctaatgataaattatttcaatttgcacttatccgctaagtgttctatcgtaaaggtatgtgttttaaggaatagaggagatttttagaatgattgaaaaagatgaaacgtttaaaaaaatgacaaacggcgaatggtattttgattccccaacggtgattgccaaacgggatgcgacccgcttagcgctccaaaaagcgggccaaatgctcgacaaccagcaacgaatcaacgccattcaaactttgttgggccaaactgggactgacttcttcgttgaaaccggctttgaatgtagttttggcgataatatcacagttggcgaccatttttacgcaaaccgcaacgtgttgatttgcgatgaagcccaagtgacaattggtaatcattgtaaattcggccccggcgtttcattattgactccttaccacccaatcgaccccactaaacgggccactaaaatcgaaatttcgggccccatcaccatcggcgaccacgcttggttcggcgctaacgtcacgattttaccgaatgtgactctcggcaagaacgtcgtcgtcggtgcttgcagtgtcgtcacgaagtcgttccccgataacgtgattatcgtcggcaatccagcccgcgtgttacgtgaaattccaacggaaaattaattcaatccagtcaaaaaaaacaggacgcgactgcgtcctgttttttttattgcgccgcacgttcttttaaatctgcgacaatttgcggataaatattatctagtttaaagaaatagagaatgatgaaatcgataatgattagaattaacggaatgaccgcgaataagacgatcatcgcattgatggcggaggccgattgcacggcaaccccattttgataatgaccaatcgctaaaatccaaccgaccatagcggtcccaatcccactaccgacctttgtgccgaaactaccagcactataaatcaatccttcagtccgaacgccatttttccattcgccgtattcaatggtatccgccaataaggcaaacatcaccgccccaacaagcgcgcttccgaggcctttaacgaccgatgcgcctaatatcacggtcacatcgcgtaagttgataaacatcaacgcacaaccaaccgcgttaatggcacaaccaatcatggctgttttccgttttcctaaccgtttaaccattggtgctgcgacgaacattagaattaaaatactaggaatcgccgtaaatagggattttttaccaacgaaactagcgtcatgtaaaatataactttgataatacatcgtgacgccaccagcttctaataaactgatgaaggtaataatcatgaaggccacgatcattaaccaatatttatttttaaccaatgcctttaatccgacacccaatgggacatttttatcagcattctcggcgactggcttaacccgttccttcgttgtaaagaaggtgattaataaaagtgcggtcgctgctaccccaaacacaatcgccattttgcgccaaccagtttgttgcccgccaaacgctttaactaaaggtaacgttaataccgtcacgagaacggtcccgacggtcgataataagttccggaaaatattaacgactgaccgttggtattgatcttgcgtgattaatgaatttaacaccccgtaaggtacgttgacggcggtataaaaaacattcacaatcacataggtcagtgagatatacatcaattgttgactctgtgcgatttgcggtactgagaaaagagcaatcatcgatagcccaaaaggaaccgccatccacttaatccacggccgggctttcccatccttactatgagtacgatccactaagagtcccactgaaatatccaagacaccatctaacaaacgaaccgccaccaattacggcagcgccaataccgacgacatcggtgtaataaaacataataaaagaacccattgatgcccaaacaagattacaagcaaaatcacccaagccataaccaaatcgttctatgaaaccaattttttcatcatccatcataatttcctcccagatatcaagttgatagctccataataaagcggttacatctcattttatatcaatattctttcatttttagcactatttcaatataatgtgggtaacaattgaaacgaggtgcacccgatgcttaataaacagtggttaacaactgatttagcacgcgactgtaataccttcatttctcgattatcaaatacccatgagcttcttcaacaagcctgcatcaatccagccttgttatccgttggctggcccgccaccttaattgcacaactgatgccttatttagtcgcgacccaaccccagttaatccaagttaatcaaacgttactctttgccacactccctttagacgataatttattattaattggccccctcaccaatcctgaaatcctcaaaaacgcgcatcaactaacgctgacggacaaacccttttcacaattggaccatgtgccgtacattaatacccagtttttattgcaactactcttaaattattttaatttaacccattcaattgaattaacgcaagctgatttgttaaccaccgccccattcaatttggactatctcgcccaaaaagcctatacccagcacacttttgaacagcaagaaagtcaattaatgcataactcatacctgcaagaaatccaaggcctcaacagcgtgactgcgggggatatcgaacgcttaattgcaaatcgcaaaacctttttccgcaacggtatcgggctcccctatcaaaataatctacgcaacgctaaaaatttagcgatttccgtggtcgccgtcgtctgtcgcgcggccatcaaagggggcattcatttcgaaacggctttttcgatgagtgatcattttatcgcccaaattgaatctctggacaccattaccgccgttgtacaattggcgcgccaaattgaagtcgaatacacgctactcgttcatcaacaaaaacaggcgactaacccccacacccataatcctaaagttgaaaaaatgaaacagtttattctttcccaccaaaacgaacccgtcacgcttcaagatctcgccaaatacctcaacagtcacgaaaattatctctcggctttattcaaaaggattgaaggtcagacgattacggcctatatcttagccactaaaatcgaatatagccaacaattattaatctataccgctaaaccgattagcgaaatcgccgcttttatcggattcagttcacagagttatttcagtcacgtcttcaaaaaggcgaccgctacaacaccgaatcagtatcgaaaagcgaatacgtttcaataacagcaaaaagagtcaccactaattgtttcaacaacaattagtggtgactcttactgattatagcggcttacagcgttgggtacatttgattaaaatcaaccactgcgccgcgtaaattagcttgatcgtgataggcacagctaacaatctccggtttaatcgaagcaatttcaacgcgttgtcggatggcagcaatcgcctgattcaacatcggtattaattgtgggttgtttgaaatcgcccctccaagaataatgcgttctggatcaaagctgtattgaatattataaatcgccttagccagggcctgacacattacttgaacagcagctttagcatcaccgtcgccttgttcggccagttcaaaaacctgcttacccgacaattggtgtccggttgctacttcatagcgtttagcaacactcacggcagtccctagctggctgacagtttcacggtcattactcaatgcataaccaaattcaccgccaaataggtgggcaccatgccaaacttgatggttaataataatcgagcccccgacgccagtcccgataatcagaaaaactaaactcgcggcttgttgccctgctccactatcaagttcagctaaagcagcacagttagcatcattttcaatactaacgggtaatccaaatttagccgctaaaacagattggatttcaaaattatgaatatacggtaaggcgcttgcgccttcgataacccccgttttttgattaactgctccaggtgaactaatcgcgaccccacttaatgggtacgtttgtttcatctgattaacctgagtcgtcaataattcataaaaatcaggtaggttatttggtgttggttttgccaagcaagcgactagctcgttaccttgccaaaccgcaaacttaatcgttgtcccaccaatatcaatcacaccgatatttttcattttattcaaactcctttgtttgtaaattcaatacaaatggcgcgactggatcagtattttcattaaataattgcatcgttggacaattcgcataaccgtatcgcaataattgtgtttcttcgggaaccgcgacttgtaaatgagttggtccaacttgaatcaccctcgtttttaaccaatgccccgcttgtaaatattcaaaatcacaaggactattaagtgtcagttgttgggcagcattaacggttagttcaaccgttaaccctttacgaatcacatcggcaataaccggtgtatccgaataaccgtttcccgccattattcgaccgattcgcatccctgggacccgcttagcgctgggatgaatattatgttcttcacccgtatcggtaatcgaaatgagatgaacattagacaatttttgcgtcactttgagttgcgcctgtctaatttgagcccaagcatcatggggttcatccgcgtatttaggcagttgtacaatataatacggcaacgtcctatctgctaacaactgacgccactccgtaatcacggccactaatagcttttcgtagaccgttggttggggcgcatcattttccccttgataccagactacttggtcaaatgtataatgttgaatcatcatcgtcatcgtttgatacaaaccacttggccgtaaaaaactatccggcgtcattggtggtggccatggtgtatgccccacttgatttttggcatcactcaacgaaaccgttgggttagcagctataaaccgctcgagatcaagattatgctgagttacttggctttgatagtcagctaattctactgtaaactgattggccgtcttatgttgcactgcttgttcaaagggtttaatgaaggttgcagttaatgccgcatcttgtgttaaggttgttgctggcaaccaagaagaagcagacgttccccctttataacaactaactagcccaatcggcatctcaagaccactctttatcaaagcgagcaaagcgtaaaaaccaattgccgataattcgcctaagtgctgctgatcaatcggttgccaacttgcggctgctaagcccgccggtttcaccacgcctgccgccgaaatagcttcaacctgagggaccgcataaaagaaagcattggttaaatccaaaccagcttgcatttgtttaaaatcgtggtcatttttcatctgatattcaatgtttgactgaccggatagtaaaatgactcgtccaaaacagatatctcgaacatactgagtaacggtaccacaagtggcttgtagcgtgtacactgtccttgaatcattgatgggtgctaactgacaaacccattgaccttgcttgtcgacaatcgtggtttgtacttgattgttaaccttaaccgaaacggtcgcaccaatcggaccctggccaccaattcgaaaggccttgccaactggtaacaccatgttgtctgaaaaaagcgcctctaatttaaatcgattattagtcatcgagcttagcctttgagggttactaattcttgatgtagtttgattaccttttcagcaaccgtcagcataatatcagcagacataaagtgatcttgcgaatgaattaacataatcgtcttttcaactttttcaccattcatctccgccgtcatccatgcggtctgaatactgtgtgcttcatgtaagctctttttagcttctactaaggtctgttgcgcctgctcaatctggccagcttcggcttgattcatcgccgtaatcgccattgatttagcatttcccgcaacggcaatcaactgcatcgccttttctaattgtttttcgtccaactttaagtctcctaactaactcttcttaaaataactattttggttctttaatggcgttaaattcagcattttcttgaatcgcatcggcattaattttattatccattttaacaaatgggacgtaaatggccgttgtaatgaatacaatcacggcttgaacgattaaacctttgatactgccggtatataataatccggaaattaacgttggcaccgtccaagagacattgttaacaattgggccaatgaaattaattttagtgaagaaaattccgatataaaaggctaacggttgtgccactacccatggaataaaatagagtgggtttaaaataatgggtaaaccaaacgtaatcggttctgaaatattaaagatggctggcataatggcaattttactaatctttttagcagcaatccgttttgagaataatagcaaagctaatactggtgaaaccgagcaagagcccgctgcgactgttgagaaattcataaatagagtcgaataaatatggtgtgcttgacctaacatattttgcgtatcattaatattccaagtcaaaccaaagattgggccccaaattgaagtgggatgaatcccgaaccattgtaatagtccccaagtgaattgagaaataaaggcaaaaataccagttcctgaaatcgctagtgcgggtttttgtaaaatggttaacaataactctggcatcgtttcacccgtaaaactagtactaatacccgtcaagatgataaagacacccatcgtaatcacaccaggaattaacgattcaaaacttctggcaactgctggtggcactgaatctggcattttaattgtcaaatttttttctaaggatttattataaatccaaactgccaacccactaatcagtaaggcagcaaaaacccctttggtgccaaagaaagacgtatccatataatttaaaacatcaactgatttttgtgtccccgtcaatggatacttaaaatgccatggcatacagataaagaaggcccctaatgcgtataaaaccgacgtcatatgttctttacttttagggaagtattttcttgaaaaagtgtgtgagaaaataacaaccaataaaacggcaaacgtatttaacgaaccgttagaaactaatccaatcaaattgcccgtcgtcgtcaaccccgaaaagaggccagaatgcgtccaagcaccccacgaaccactaatcaatttacctagtcttaacccttgctgcccaaaaatgaggccgttcgtcggatcaatgaatacattttgcatcatgatcgcaaaaccagcaatcatcgaggttgctgcgacaatgatgaaagaatcccgtaatgttaataagagtttattcgccgcaattttcccagcatagcgcgtgaaattgccttgaaatcttggccagcgtccttctttttgcgccatactattcgaccccttcctctgctaatcgatttactaaaacttggccatccatacttccgaattcttgcattgataatttaatcacttttttatctggatgtgcttcaaccacttgatcgtaagcccatgaaatttgaggagcaatcacaatgacatctacgtcatcaccaacttcatcgatcataccaaaatcataagcatctacttgaacattcttttgctcttggtcgtaaaccttctgcattttagatcccactaaactagtagacatcccaccactacaaaataacgcaatacgtaacttttcactcattatgattcctcctatattttgataacgtttacattatgagtataagtctatacatttataaatgcaataacaaattataatttgtagtaacaaattttgtttattggttacatcttcagccattttattaagcaataaaaaaaagccaccccacaactagctgcgaaatgactatcctttatgttaaatcaattgtatcgtgtaacgtgaattgggttgagcgaatgtccgtactgacgtattcaaaaatttggccattttttaagaacgagcgttgctcaacggtaattaacgcctctttttcagttaaccgcatcttttttaccagcgtttcgtctgcgattcgacttgaaattgttcggacagcagaccctaactctaatcctaaatcagcttgtagaaattgataaattgaggcctttaaaacggccatctgaatcccttgaataattttagcaggcatatagaggtgttgaatcgcaataatttggtcatcttttctaatttcccgttcaatctcgtaagcaaaatcatagggactcatctttaaccgcttaacgatactggattcaggcttatcaactgcgaaatttagcaaaaccgcactcacctgttcaaaatcaaaaagatccaaagaagctttatacgtcggcgttgcatctggatgattatccttaacataggtaccagaaccttggattcgaaatatcaaaccctcattaaccaacaaattaagcgcgtttctaaccgtaattcgactcacattataggtcttggccaaaaccaactcttgcggcaatcgctgattttccgtatattgctgttccataatcagttgtctgatatgatcagcaacaacctgatatttaggtgtttctttcaaatagatacctccaaaatactaataataatttagtacttgatgacaactattatatccttaatatttgttataacaaactcaatctcagaaaaatatttatttgtcgcttttatgtttttacctaatccaaccccaactgcgcttcaattgttgccaaaacgccatcatgattatgatcggctagtgcaacgttgcgagtggcctgttgaatttcgggactggcgttaggcatcgcaaagccccacggcgtcatctgcagcatccctaaatcattttcattatcgccaaacgtcataatttcatttgtttcaatctgatagcgcgtctgtaattgttgaatcccagtcactttatcaatccccgcgttcccaatcagttcggtttgaaaaccagaattttgactcgccaaactagccggtaaagcagtcttcaactgagtcaccgcttgttgataatcgacagttggcccaaaagtcagcccaatttttgtaatccgatcattgacccgcgcttgactaatcgtcgcaaaatcaggcaccaattcgatcgcatgatagtaacgctgaatgttcgccaacgtcttggcggcaatctcagccggcacatacgtcttcttgacaccggaaatcgtcttttggacaatcgcggttgtcccgaacgcttgcataattcgtaacacttcggctaaatcagcctccgatagcgcatcaacactgattaaatcatcaccttgatggacaatcgccccattttgcgaaataaaatcaatgatttgtttttgcggggcaaattgattttgtaatcgttggtattgcgacccactcgcgaccacaaaatgaatctgacgcgcttggaattgttcaaaaatccgggcaaaacgccgttgattatacgtattatcctgattcaaaaacgtgccgtccatatcgactactaccattttaatgctcattcaataacctcatctctgttatcttcaaaatactatctctactattttagcggatttttcaagatgatgcaaagcggttacaacaactgaattccagctgtttcgcactggtcaatcatcgtttggggccagatactggtttgcacttcgccaacgtgcgctttgcccaataataataaacaaagtcgcgattggccgatgcccccaccgattgtatatggtaattggccgtttaacagcgcttggtggaacggtaacgacactcgattttcagcatgcgccgcttttaattggcgttgcatcgcggcttcatcgacccgaatgcccatgctcgataattcgagtgaacaatttaacggtgcgtaccagaataggaggtcgccattcaatgtccaatcgtcataatctggggcccgaccgtcgtggcgttgacccgattttaataacccgccgatttgcattaagaacacacaacccaattcttgcgtaatggcattctcccgttctttcggcgttttagccggccaacgatcagctaattcctgggtcgtcacaaaatggacggcatcgggcaattggtggactgcttgtggatattgataccaaacttcgtgttccatgtgtttaatcactttaaaaatcgtttcaacagtctgtttcagcgtcgcttcagtccgttcagacttcgcaatcaccttttcccaatcccattgatcgacataaatcgaatgaaaattatccaaatcctcatccttgcgaatcgcgttcatgttggtgtagagcccttcgtgtagttcaaaatcattcttagcgagcgccatccgtttccattttgccaatgaatggacgatttcaatcgtgtgcccgtcaaaatcggccatcgtaaatgatacggggctttcgacgccgttgaggttatcgtttagccccattgcgtgatcgacaaacatcggcgccgacacacgggatagattcatttgttggccgaattcatcttgaaacgtttcgcgaataaagcgaatcgcggcctgagtttcccgtctggataattttggatcataattttctggtatggttaaatgcatattaatcgactccctcattgaattcacaaaataaaaaaaagcccttcatccccctaatacaagggacgaaagacttttcgcggtaccacccaagttgcccgcaattgcggaccacctctactaaacgcactaacatgcgcgccggtgataacgttccggtaacgtcgaggcctactttgtgcgcgctacatttcagcctgaaactttaaggagggttattcaatcaaattgccgcttgtcgggtttccactattccccaactcactgttagcgcaaaaatgacctacttggctcctacacgtttttattttgtgttttaatgatagcacaattagaaacattaggaaagactcatttagcattagaagtacatctttttttaatatgcctaatccacactatctggaccggcaatattaccaccaatttcagggaattgatttttaactcgggtatataatcccgcgacatcctcaccattaccagctgattctttgtatatcttaacaagtgtctcagccggaatactccctagcgcactgacgttgcaaccaaaagtttcggccaatgttcttctaatatcaggtgcaaatgccggtgctgtcccagcggttgccgcttctgtttgcgctgcagcagactcagctgcagctgaactcgcttgggccgaaaccgagttggcgactgattgactcgcactttgaacggctacttcactcgcttgtctggcagactcagacgctgcaacaactgattgactctcagcaatactggtttcagaggcgactttagccgaactgctcgcaattgatgtacttttctttttcttcaatgattcattttcagcttttaatttagccacctttttctgatgacttactttttgagcactttcttggtcagcctttttagttgattgattatcattggtgcgacagcctgctaacaaaataaggctcaacaacccaataatcccactactatatttaatccgcattaattactcccccttggtatttcgaattaattcagctaattccgtttgagcagcgctatctttagaaataatgaacgtactcgtcggagcattgctaccagcaccaccattatcagcaaattcaccaaaaccgtctgcaggactgacactcgtcccttttccaagcgctacttcgtaaaccacgccattatcggctagcaaatatttactagctggttgatcaaaatccatattaattgaatagccttgtgcggttgttccgcttttaagcgtgctatcaatcccaacttgaccatctttagcggtgtagaaaacgaccccgccaatcgcgtgtaagttaaaagcagttgccccaggttgatgattatcttgaacctgaacttggccatccggcgtattcgcataccaatcacctagaccacctgagccgtggttgaaataataatcactgaccgccatatttccagttgctgctcgcgaactagcccacgccaaaaattgcgttgtaatcgttaatttttgagtatccgttaacgtcgtaacttgttccgccgttgccgcggtttgactcgactcactctgactagtcgtacgactagcttgttgcttatccaccgattgcgatgacgttgtttgactagtctgttgcttaagcgccttgttttcagcttttaaactggctaaacgtttatcgtgttgttggctaacgtgacttttttgcgacgttttggccgatttgtctaccggattaatcccacatcccgttaataacaaaacacttaacaaacaactgccaatcccatacgcgattttcattttaatactcccccgctaagcgctaaagtttttcgtaccacgctgttttaccctcatcgacatgttttaacaagactcgttcttgtccgttaatcacttttttctcaatcgtcattgcaaattgagcatccgcactttccaaataatttaactgatcggtcgacgaccatctaatcgattcaggatacatcgtactggtttccccatttttagtcgtcatcacgatagcattacctgcagcattaattttaaccggcaacacttcattcggatcacccgcacgttcaaccaattgccattgaccctctaaatcggtcttactcaatgtctccggtgcttttaatactggatcgtgatttgttttagccgaagaactagtcgccgccgaacttgagctagccttattcgtactttgaacactggcttgtgaactcgcattttgtttctttaatgacgcattttcagcagcaatactggcctcttctttcgaattcgccaccgattcttgacggttatttaattttggttgccgttttttcagagttgttaccgacttatcttgtgcgttcgttaatacaaaataactgctaccaccaacaatcaaaactagtatcaacaatcccaataaccacggccaaaccatttttttacgtttagctgatcgttcaatcggttgaaatacaaagccacaattggtacaaaacgccacggccaattcattgaaagtcccacattgtggacattgtttttcattaatattttgattattttgattcaaagcttgcccacaactttcacaaaatgttgcttcgagcggattatctgcgccacatttcgaacactttatcatccaccaattcccccttacttctgattcggctgacggtcatctggattaattggctgttccggctttatttcaggttgatcagtcgtttcttgttcgttattctggtacattgtttggccaccgttcattggttgctgatagccataccctgatggattaccattcattggtggttgttgtccattaaaattctgataaccttgtggttgattgggttgacccatattttggttaggataaccctgttgattccactgattcatttgtggttggggcttgtcaatcagcattaaataaagaatataccattgaacaaccggtactaaataaagtacgataagccatggctctttccctaaaaatctaagacgacgtacacctgcagataatcctaaaacagtcgccaaaacagacagaaccgcgtatatcaaatatacaacaagtgttactacaactcctaatgtttctaatagactactagaaatagttataattaccattccaatcaacattattacaataaaagcaatcataatccctaattctgaccaccagaagatcgatttacgactttctggcgttttaaaatcattccagtgcgcaatggcgtatttagtactgccgataaaacctaactgttgttgattggtagcatcaccattgtattgttgttgaaactgctgaaattgttgttggaattgttgcgttttattcacaaaattattcggttgattattcccttgcggcgcttgattatgatattgattttgagcggcctgttgaccattcatttgttgatttggctcatttacttgttgttgcgtcccacaataaggacaaaatttaataccttgtttaatttgttgcccacaattttgacaatacatcatgactcattcccccgatatttcttattgattctccacgtcatcaatctgactaatcgctttattaatccaccgttgtgaataatcatatttatgcatcaacgcagctgaattatggccattaaattgtttttgaaccgatttagcgaccttatcccccgcgtacatgcgcattggtaatgttaattgttgaccccgataagctgaataaactttcaacatcgcttcttccccaattaaatcgaataattgactataaacatcttgcagattttcccgctcaactttcacacacctgacacctctttccaagtttcttgccactaatctcgtcattagttatgttatcaaaagaacaaagccaatgataacgtgccacaacctgcgtttttccttgcaaattgcacgtgttaatccatttaaaattgctcagtgcatcaaaaaagacccgattatcggattgataatcggatctcgtttttatacatcctatttgtgatacggactcccgacattgatcatgaacgcgcggtagatttgttcggttaggaccaaacgcatcaattggtgcggtagggttagtttgccaaacgaaagcgcatcgttagcgcgtttgttgaccgcgtcgctggtcccgagtgaacccccaattacaaaggtaatgtcggatttaccgtaagtccctaaatcggcaatttctttggcgaattcttcggaagcacgctgcttgccttgaatcgcgagcacaatcacgtgttccttatccttaatcttgtttaagatccgttcgccttccttatctttaacggttgccatctctgaatcgctcagtgattcaggcgccttttcatccgcgacttcaatcatttcaaatttacaaaacttaccgagccgtttggcgtattccgcaatcccggccttcaaatatttctcttttaacttacccacggtaatcactttaatattcatcgaaatcctcctactatctctttatagtttatgcgaaaatgagtcgaaaaaaaagggatacacaggaaatcacccaaaatgacaagttatccacaaaaattatccacatatgcacaggtgttcgtcccaaatatggtgtcctgaaattttcttgatacaaaataatcgattcgaaaatttttttactttttttatcaaaaaagttatccactatttaagaaatctttaaattactcgtttttagattgcaaacactgttatagcagcatttataattagattataattttaaataaatagttatccactgatgttttgtcaacttgtggataacagtggtgctcaatcgaccgtgttatacccacaatccacagacttatccacaatttgttgctgattaatccaacttagtatccacattgacattcttaaaacttaacgttccggaatgttaagcccgttataaaccagtttttacacgctatcatttaagaccctcaaaaaagcaaaggtgtttcccttaaggatcatcaccttttctggttaactacaaaataccccaattatcttaaactcaagataactggggtatttttggttaatgctcagttgctaagcgcaactcaacgcacttatttagttgttgtactgctgctatcagtcgaagctgattgcgttaatttaacggtcgttttcttcaatgaaccgttatggtaatactgaatttcaacggtgctattcatgttataactgtacaaaatcgtgtgtaggtcagcgacactcgtcacggtcttaccgcctaagccgacaatcacgtcgtatttactcaagcccgcctttttagcgactgaactattcgtcacagaggccacgacaaccccgctcttaacggacgttggcaatttcaaaatggaggattgttgcgttgacgaaatgttggtcaagtcaatcacgctaatccctaaagctgggcgaacgactttcccgttttcaactaattgattaataattttaacaacttcgttacttggaatggcaaagcccatcccttcaaccgttgtatcgccatttgacgctagcttcatcgaattaatgccgaccacttgacccgccatattcacgagtgggccaccggagttccccggattaatcgccgtatcggtttgaataaccgttgcctgaccggttgcttgacccgttgtttcgtcggtcacatcaatggtccgcttcttggctgaaatgatcccttgcgtcacagatgtcgcatattctgacccgagtggtgaaccaatcgctaagactgattcaccagccttaatactatcggaatcaccgaacgtggctgtttttgtgactttagacccgtcaatttttaagacggctaaatcggaaacagcatctgtcccgactaggctcgcttctaatttagtcccatcacttagaatgacttccaatttatcggaatcagccacgacgtgattattagtcacgatgtaggctttaccatctttcttttcgtagattaagccggatccttcactagattcttccagatcactactgctactactgccactagtggtgctactactatcgctatcgcttgatccgaatagcgcgcttaaatcaccagatgattctgcttgcttttgtaagttgaccactgacacaacggccgttttaactttactgaaagccgttgtggtttgtgatgacgaattaactttgacgttactgattttagtcgtcccagatttggtaggtgtttgcgccgtcgttgacacattggcagttggcccaaactttgaaagtcccgtataggcaaccccaccaccaatcaacgctgaaataacggcaaccactgctgttttcattaaacctgaattttgattcatactaaatcacccaaactttctaattttattcttttactcgatgactctatcataaacgctaaatttgaaaaaattatgaacaagttttgaattaatgattgtttttatattgtgaattctagacgatttacccgccaaaaacaactgaaatgtcttgtagaatgagaaatataggccgtgatagcaggtatcaatctccgttcaaatcaaaaaatctaggctatactcagaagttaaccggctgaagttagacacttctattttaacgtgcttctaccgataagtttctgtgcttagctacgtctggcaaacaaagtccataatgcggcctttattcaccagactaggctaatgctcagaatcaaaccgtgggtgtgggcactcattttataacgtgattttgagttgcaacaacttccgcttaacctaaaatcaccaattatcttaagttcaagataactggtgatttttgttaatgctcagttgctgaccgcaactcaacgcactcattttcaaactgcgaacaatggatcggcgattgctgggtcggtgtctaagatttcaaagtcagtgccgacaccataatcatgttccttcataattgacgcgaccgttaaatgggctaattccttcatattattttcttggcttaaatggcctaagaaaatctttttagtttgttggcccatgcacgccattaaagcggccgcgccatcttcattggataaatggccggtatcgctcaaaatccgttgcttaagcgaccacggatactgacccatccgtaacatttctaaatcatggttacattccaccaaataggcattggcgttggctagcgtcccccgtaattgatcagatacgtaacccgtatcagtcaacatcgcaaacgaccgatcattatggtgaaattgataaaattgggctgcggctgcatcgtgtgagacgccaaaactctctacatcaatgtcgcctaatgtcttggttttgcccatttcaaataggtgttggtgttcaccggggacattcccgataatcgaagccatcgcatcccaagtcggttgattggcataaacgtccatcccgtaccggcgtgctaagacacccacaccgctactatggtcgcgatgttcatgcgttactaataaactatcgacgtcttttaaatcacgaccaatgctgtgcattaaatcttgcacccgtttgccactcatcccagcatccaccagaattttatgttgcggcgtttcgatatacgttgtgttgcctgaactactacttgctaagatactaacttgcatttgatcattttcgctcatttgattgttatcccctaattgactattgcacatcgcttcgatttttcatcaacgctccggtaaaggcgttaattcgtttgacgacgacgcttttagaattcttgttttcaatcgccacttgccaaaccggcacgtaaacggtgctactgtttgcatctagcaacgcactatagcctaatttaacccaactgaccttagaattattcgggatttcattatccgtgtataaatcaatcaccgcttctttagcgctcaccttagtcatttctttttcccgcaaaatttgaatcttgttcgcatatgtttgggtgtattgattaatctgaccatcttcaatcaggaaaactagctggccatgttcatccatcataaccccacctggtactttttggacgaaaacgacctgttgatcactggataattccggcgaataacggtattgatccgctaaaacaacgttattattcgatttcataaacgctttaacggctaataatgcgtgatttttccgataagttaacggcttatctaactcactgattaaagttttctgcgtcttatcgaagctaacgacttgattagtgagttgttgactactcgttgccaacttagtttgatccttttgacgactggctaaataataaccgtcttctttagcattcgagagtggtttaaccgtaatttgatcatctttcaaatcttttaagatttggatcgtttgcgaaccactggtgatggccgtcgaactgaccgcctgattatccttgagcgagataaataaatagatatcgagtgcaataaaaatcgcaataaaaatcatttcaattcttcggaaatccattaattcagctcccttcggttaattcagtctttagcgccaataaggctgacaaactccgccaagtcccttgatattgaataaaataagtcggattcaaatcaatcacttgatcgttatcactttctttggtccattcatacccaacctggatattatcaacgtcttctagcaagaaaccattttgcgtcagttgatttaataccgattcagtactgtccaatgtcacctgatgatcttcagcggggactgggacttgcaaactgtaattcgaaaaatcaacgcgttggcccgttggtaagagctgcaccttgacgctaccaaaattagtttgataaaagactgggaacccttcgacatacgttctaaacgtcgtcgtgtccgtcttttcatcgtgactgtaatagcgcatcccagctaacgaatttcccgtcttcaacaacgcatcgaaactggtttcaaactgtttagtcgtcgttttaggcacagcgacatcctcgtacttgataaacgaaatctcgcccgttttatgatcgatggtcaagcgcttatactgttcgctatcggtcccatccgtataaatcgcactatcaccttgttctttcgtgttgatactatcggtgttctgttgatttaagagtgatgaaatgtaatagttttccggttgctgattgaccaaataactgtatggcgccaattgttgattggccgctacgtacatcaatggtttatggtttaaaaattgttcttcaaccttcagatgaacatccgatgcattgaccagttccttaattttctgtttcgaaaaaccagtcaattccccttggtaacccactttggtgcgatcattcaataaccataaatcagccgtcttactccctaacgtaatttgaatccggttgaaggttgcgttatttttaatcccaccgcggtttttcccttggtaactaaaaacttctttcaaaataccgtaagtcacatcatccggatacaacaacgtcaccgttttatccgtttttagctgttggccataccgcgtttcgttcaatttaacctttttaaaggccgcaatttgtgtttttttcaacgttttcttcaattgcgtcacaatattttccttcgagttatacaataattcactttgatctgattgccgccacaggacctgtgttggcaaaaaggtgtctgccaattggtgatccgcattgcgggttggcgtcttctgcgttgtttggctatcggtttgccgttcataatgcgaattattggtccaaattttccacgataataacagactaatcccgatggccagaatcaagccaagccgcatcaaaaagttattaaatctcatcccaatcacccccgtcagtttcaatcggttcgtacggtaacgagatgtagaacgtcgatcccttaccttcttggctatcaacccaaattcgaccatgatgggcttcaatcacttctttagaaatcgctaagcctaaccccgtgccaccttgttgccgtgaacgggccttatccacacggtagaagcggtcaaaaatcttgcctaagtctttccgaggaatccctaagccttgatcagagatgcttagaattacgtgtcgatgggtttctaacaaccgacaggtaatcacaccaccatctggtgaatatttaatcgcattattcataatattgtcgacaacctgcataaatttatcggtatcaatttcgacccataaatcacgattggtgaaatcacgattgatgctatattttttatttggatcgtcagttggcaatttacccgtcacgactggttccaaatcattttcatgttcttgatcccgtttaatcatcatgtcaaaccggtctaacgcgtaaccaaagaattcattaagattcacaaactctaaattcatcttggacgttccttggtccatccgcgacaaactcaataaatcattaatcatccggatcatccggtcagtttcttcttgggtcaccttcaaaaagttcggtgcgacttctggatcttgccacgcaccgtcgttcagcgcttcaatataactccgaacactggttagtggcgtccgtaattcatgcgaaacgttcgaaacgaattcacgttgttcgcgttcatttttttgttgttccgtgacatcgtggagcacacaaactaacccgctaataaagccggtttctttttgaattaacgagaaatcaacatgtagaattaaatcatgttcctgttgattggaaaaatccaagaccatttcttgttgggtttctaataaatcacgcaaggtaaattcctcaccgatattcaacacttttagtaatgactgtccaataatgtcatcactcgtcacgtttaagaaatcttgacccgtttcattaataatcgtaatattgccgcggcgatcggtcgcaatcaccccatcggtcatgtgactgaggacactatccaaccggcgtcgttctgattcagatgcttcttgggcttcttcaacccggaccgataagttgttgacggcaattgctaattggcccaactcatcttgcccgtaaatctgcacttgaccagaatagtccccgcgcgccatttgaatcgcttgtttcttcatttcatcaatcgggcgggtaattgcccgggaaataacaattgataagacgattcctaacaacccggcaatcaaagacgacgtcaagaaaatcaccgtaatcgacgaaatgcccttataaacgtcttccatactagcccgaatataaacggcgccgacaaccgtattattatcacccgttgaattggttaacggttgaatcgcggtgtagtaacttccttggctttcgctataaaccacttcttgttcggtatgacccgaataaatcgcttgtttaacccgcgaattccgagttttctgaccaatcgtactttggttattcagattggtgacgccgcgaatcgtaccgttactatcaatcacttggacctcggcagaattgcccatatccccgatgatctctttaacattcttattcgtactaccgttatcgttgactaactcgctactcaattgattttgaatatagggcgtcacttgtaacgattgtttaaaatccttcacattctgcgcttctaattgtttgacaaaagaagccccaatcacttctagcgtgaccagtagcagtaacacgaaaacaatcgcgattttaaaatgaatcgattgaaataggcgaattttcttattcatgcgttaaatctactcctgctccggatttctcaaataataaccaacgccccggcgggtgacgagccattcaggatgactaggattatcttcaattttttcacgtaaccgacgaaccgtcacatcgaccgtccgaacatcaccaaaataatcgtaaccccaaaccgtctgtaacaaatgttcgcgggtcatgacttgaccaatatgtttcgctaaataatgaagcaattcaaattcacgatgggttaattcaatcttagtcccccgtttagacacaatataggcctctggatgaatcgttaaatcgccaattttaatttcatgattttcttcgctggcctctttatcagattgactggtattcccttgccggcgtaaattagccttaactcgcgcgactaattcccgattggagaaaggtttcgtgacatagtcatcagcccctaattcgagcccaatcactttatcaatttcagaatccttagcggtgaccataataatcggcatatcgtgcgatttacgcacctgacgagccacttcgagaccgtcgactttaggtaacattaagtccaacaaaatcaggtctggcacgacttcttcaacttgatctaatgcttcttgtccgtcatacgcagtgtaaacctcgtacccttctttcgttaaattaaacttaacaatgtcggagattggtttctcatcatcaactaccaatatttttttagccattttagtatcctccttggatgctttgttctctattatactcatttttttagcgcaattcaaaatctgccaccgtttttaaaccgcaaccaacctgggtgcttcggattaaatcacgatacgatttgtcgcaataggcaactaatcttactcccacaacctatttatttaaaaaaatcacagaaaagtatttacaaagactgcataaacatgctatgatatttaagtcgtaaggcgcaacaccgaatgggtggttagctcagctggcagagcaacggactcttaatccgtgggtccagggttcgatcccctgaccacccatcaagtatacatgataaagtggtaagtgcaattcttaggaattgtccttatcacttttttattgtcttattttaggagactgctaagatgaagataaacactatattaatgtcgatgtactcattagtgacaatacaatctggaccactcagaaatcgatggctgaattgtttgacgttaataaatctaccgtttcaaaacatttaaaaaagtgtcagccacgattaatcatcacggctggcacttttttattttaataccatctcaatatgcggaatctcatcttctaaatatacgtctgaaacggctttaaatccgaagctttcgtaaaaagttctcaaatagttttgcgcgccaattctaaccggcttgccgggaaacgactgcttaatttcggctaacgtactggtgattaactgccgacctagtttgcgttgacggtattctttaggcactaatacacgaccaaaatggacttcatcagtctccaccataatccgcgtgtaaccgaccagttgcccattttcgcgtaacactaaatggtacgcctggtcgtcttgatcatcaacctcttgatacggacactgttgttcaaccacaaaaaccttaacccgtgcttttaagatatctaataactccggcgccgttaattcatccgtctgtttaacactgacttcaactgtcatgattgccctccactaacttattggcttcattatacaatgactcacactgagttgatagcggctaagctttcgttatttcattatattgatacaacaataattccataatcgcaatgagcgaaacatgtgatgtcatttctattttattttgataaaattcatctgtaaatagataaagattaatgtcactcatattttgaattgtattgttattagccccagtcactgagattaactttgcatattggcactttctttcaataatttgtagaatctcaatcagttcatgatcttccccatcataattaaatacaaataaaatatcagttgcatcgatattccgataagccagttgtcgttgttcataattcttcggaaagataacgataaaaccgctcaacgtgtataaatattcgatatactcagcggcatatttactaaagccctttgcgaaaaaatagagttttggtttttgttgcatcagggaaacgatgctatttaatttaatgttatccaaaacacggaccgtttcattaatattctttaaatactcttcgcgataggcggtctgatcgacaacaaatggttgcgtttcttcagtctcattttgattgagtaccgtatatttaatgaccgtgacaaattcgctgtatcccgaaaaaccgattttacgaacaaatcttaaaaaggtggttgtcgatacaaaacattcagctgataattcgcggatgtttttatttttgacactatccatatttttgatgacaaaatctaataacgtctgttcatttttattcagcttttcaacgttagcattcacaatttcaaaaaaattcatcttatacctccgtatacgtcggtaaggccgctacgacacaatggatgttgccaccgcctagtagtagctctcttgcgtataccgtttctatttttcgatttggaaaaagctttgtcaacaaagtaagcgcaacgccatcctgtggatcatcaaaaatcggtaaaattagcgcattatttagcagataataattaacataactggcggttaaccggtcgccggggtaccgcggtaataacccattgaccggatcaacccctgaactttctgcagctgttgcaaataaaggcttcggcatctgtaacttatggataattaattttcgacctttagcatcaactgctttgcttagcgtatcataggcttgtttcgaactaatatattgaggatcagcttggtcgtcggtccatgtcagtaagatttccccaggacgcacaaaactgatcatgttatcaacatcaccgttagtctcatccatgaaataacctttttgtaaccagataatcttctcaacacctaaaaaggctttcagtattgtttcaacaatgggttttgctaactgcccgttacgcccctctgataataccgattcttcagtcacgactaatgtgccttcgccgtccgtatgaaaagcacaaccttctaagataaattgttccaagcgataataatcgattccctttaattcacataatttttgagcaacttgatcgtccatatcccaagggaagtacagtccatcaaccaacccaccccaagcattaaatcgccaatcaactgcgcgaatatttcctcgctgattcaatagatacgtcggcccaatatctctaatccacgcatcattgtagctcatctcaatgactttaatggttgctggtaataattgccgtgcattttgatactgctctttggaaactaacattatcacagattcatagcgactaacgatcgttgcaatctcgacaaatacacgttgtgctggttttgcgccattccgccaattatcggaacgctccggccacatcatgattgactcttgatgcttgacggtttcggctggtaaataaaagtgatctttttgtggtgttgaacctagtaatttcataattaaactcgactttcatatttaatatattactaataatagccaaaaagcggctagtcaattcactagtcgcctttgaagccttattggtggataacagtccctttggtccccttaataatgtcactgacatcttctaaagccccaatgacagcgggattccctgtcttttcaacaaattggacagcggctttaaccttaggcatcatactccctttcgcaaactcatcggctgcgatgtgtttttgaatttcagtggctgtcacattaaaaatctcttcttgattgggtttcccaaaattatagaaaacgccaccgacagaagttagaataattaactggtcagcatcgactaattcagcaatcttagccgcactgaaatctttatcgattaccgcttcggtcccaataagttgttgtcctttttgaatgactggaatcccaccgccaccagaaacaatcggaataatccccgcagcaataatttgcttaatcgctggatattctttaatttcaactggttttggtgatggtacaacccgtcggtaaccccgaccagcatcttccatcatttcccaattgggatgttcttgtttaatttgtgccaattctgctgtcccatagaacggaccgattggcttactaggatttttaaacgctgaatcatcagcagcaacaattgtttgagtcacaattgagaccacacttttattgattccgttaatggctaattgttcttgaaaggcattctgaaaccaataaccaatactcccctgagtcatcgcaccacacgtatctaaaggcatggctggattttgttgactgtcagtagcttgctgttgcaataacaaattaccaacttgtgggccattaccgtgcgtaataattaactgatcaccattcttaacaaacttgattaatgctttgaccgtttctttaacggcttttttttgagcatcggcagaagcatcatttgataaaatcgcatttccacctagtgcaacgaccactttagccataataacctcctagcggccagcaggaatttgttgtgtaatacaatggatattcccaccacctaataaaatttcacgggctggtacgcccacaattttacgatctggatataattcttgaagggtcgctttagccttttcatccattggatcatcgaataatgggaaaatgatacccccatttgcagtgtaatagttcacatagctagctgctaaacgatcgccttccaaacgtggtaacgtcccgtcaacagcatcgacgccttcactttctttagctgtaattaaaatcggtttcggtagatacagtttttcaacttgtaaatgtcgccctttagcatcggtctcatgtgttaaaatatcataattctctttagaaatcgcatattgtggatcgctctggtcgtccgtccacgccaatgcaatttgccctggtttgacaaaattagcgatattatcaacgtgtccattggtttcgtctaaataaatccctttcttcaaccaaataattttctcgacatttaaatattcttttaaaatactttcaatttgccctttagaaagttgtgtattacggccgtcggataatagacattcttcagtaacaatcaaggtgccttcaccatcgacgtggattgaacccccttcaagaataaaatcgtctaaccgatagcgatcacgatgttccaactcacaaactttttgagcaacacgatcatctttatcccatgggaaatataaaccatcgactaaaccgccccaagcattaaacgtccaatcaacgcctcgaatatcgcctttatcgttcacaacaaaagttgggccacagtcccgaatccatgaatcatcatttgacatctcaacaacggtcacattatcagctaacatatgccgagcgttcgtatactgacgatcactaacaccaaccgtcacggtttcaaattctgaaatagctgctgcaacttttgcaaaagttgcttgcgctggtttagccccttcacgccaattatcaggacgttctggccataatagatagacacccttgtgcgcttcaaattcaccaggcatccggtagccatcttttttaggagaagtttgtaatgttttcatttgattacttcctttctgaatcttctttaacttgtttttctgcatgtcgaatacatatttcaccaatcaccattgtgacaatcgtacctaatagaattggcaatttactatttaattctgcctgactaccattcaatggaaagaccgttaaaatcaacgtcagtatcaacagaaccaacggaatatacgtcattaatcgaattacccagcgattaccgggaattttaaatggtcgttctcgtttagcatcgattttacgtaaccgtaagaaagctgggaacattagaatgtatgatcctaataatgcgaccacgtttaatgagaagaacgcccagaaaatattaggatttggaataaacggtgcagcgactactagaacagtcgcaatgacaccatttaaaatggtggcgccaatcggcatctcatttttagcactcacctttttaaagacccttggtaaatcattattcttggctgcgtacaaagcgacgtaattaacacccgctgaccaagaaatcaaattggccgctaacgtatacatgaaaagcaatccgatcaagatcacgaaccagttatggtggcctaccaataataagatgctgtccattaaaccacccgaagcggataattgactacttggaatcgcagcccccatcccaaaggcagcaaatagatagaataccgcaattaaaacgccaccccagatgattgcttgtggaatctgtttcttaggattttccatatcaccggccatcgtagcgacgacctcaaatcctagaaagttaaataggataactgaaatataacttaaactagttgcatcaaatttcggtaacattgcggttcccgaaaaatcatttgctaggccttgagttgcggcgtgataaatacctaacgcaccaacactaaccataataaccactttagcaaccgccgcaaaatttaaaatccatttactatccgcgattggataacaactaatgagtgtgacaatccaaataaagagcagttcaacgccaattccgacaccagtactcaatttaatttgaaagatttgttcaatcacttcgttaaataaaacggcaagactagccatccaaattggaaaattaatccaatataaccaggctgcacgcccgccccatttatgaccaaaggctcttctgacccagtcataaataccaccttcatcattataggtcgttcctaattctgcagaaattaaaccatacggtaagaagaagaataatagtaatgcgccccaccaaaagaattgtgatgggccaatcgctgcggctggagcagctgactcaactactaaaacaacgactactgccattaagactgcatcaaacagtcggaactttttctttttttgcatattgccaccctcatctattcatccactaattaaccaactgatctttacttcgttgaatcaacgcgattaatcaataaagctttcaatgtttcatcgtttaaatgatcaagtgtttcagtcgaataattcatagttggtgccattagataaactaataaagctcgcattgccgtcaaccggttttcagcttcatcccaagcaactgatgcctttgaatctaggacactatcggttacttcttccccgcgattagctggtaaacaatgcataaatttagcatgtggtgcagctttagccattaattgatcatttacttgatatttaggatagaagattgccatccgttcatcgtatgataatggtgattcgtataaaccataccaaacatcggtataaacaaaatcggcatccttcatcgcttcttcagcatcttctgtgattaaaacactgccacctgaaagttcagcattcttttgaccaattgccaatgtttcaggtttaatatgatagcctttaggcccaaattgaacaaattgcattcccattttagttgcgacaaacatcaatgacacacaaacttgagttgcatccccgacgaaaacgactttacaatcactcaattttttacccgctggtaaatgttcagccatcgtgataatgtccccaatttcttgtgttggatgattataatcagtcatcccgtttaaaacaggaactgttgcagcgttcgcaattgtttcaattgtcttatgggtcgccactcgagccattaaaatatcaaccaatcgggataatacaatggcagtatcgcctaatgactcactttcggaactacctagatggatttgcccaggtgctaaatactgtgcatgtccacctaattgcgtcatagcagtttcaaaggacactcgtgttctggttgaagattcttcaaacaacatccctaaagtccgattactaagtaattgtggatagttacccgctttaatatcgtgtttgatttgtaagcccaaatcaattagatattggatttctgcttgtgtgtaagtttttgtatcgataaaatctcttttcataattggccatctcctaaaataattaatctctttttgactacgcttacaatataaaattttttcgtcttgattgaaatagtttttaaactgttcgccgctgagcatatcagggtgtattttgtacctttttaagtaacaaaatacattgcttctgaaatgccggtctatcagccttgcaagtagcgcttgcgctaaaatgacttgtttaatttatttttaaggctatcatatgatttaaattaacggtacatattcatggaggacgtccgatgctcgccacaatcttaaaacaacgccggctagaattaaacctgacccaacaagcggttgccgaccaattacacacgacccgccaaacgatttcgaattgggaaacgggcaaaaatttacccgatgtgccgctattgattgctatcagtgatctgtatgcattatcgttagacacgatgctcaaatccgattcacaatacgttcaaaaggtaacgactgattatcaattaatcaatcaagctaaaaaacaacgacatctcgactatgcgctagtcgccgtcatactgttattaattgccacgccgttcctcgctaactggttgaaaaccgatttcagtgatcggttactcacaatcatcattattgccatcaccaccgtactcgtcgttctttcctattatcgttctaaaagtttcttcccgaacatcccaggtacccgaccaccactcttcgttccccgaactttcggggttggtctcacgattaatccgaaccacccactcggtaaattattgtggttaacaattttactaattttaattggtagtattgtttggggcagcctttaatcaatcagaccactctgctgaccgcagagtggtctttttttgtccaaaagattgtaaccaaccgttttatttaaccgcgataattttatttatgataaatattccgaatttacaactatctcaaaaagtggtattcctataagtagacagtttcatttctgaaactcgtctaaccctttaggaggcgttattgtgaccatcgaaaaacccaaacaaccatcaactgcagaagtcgaaaaaccaatcagctatactgatcattactatcagaaaggtcattggtggctcaaaatccggcaaacgattgtgattatattattatggttgtgtgttgtcattcccctttattggaccttatcatcaaccattctggcacaaaaaccgtatctttatcacgcttggcgctacgctgaaggtcgtgatttattctacttttatgatttgtttttcttaattgcgtttatcattttagcgattattattgttggcgcaacactccacaacaaccatcgaatgaaacaacacgtgcgcaaagaggtccaatacgatcctgaacaactacgggttcgtaaagcaaaactagagaccttttacacggatcgttttggtcaggctagtttccgaaaaagcgttcgccgttacaccgtcaacccggatcaaaatttagaaacccacactattcagaaattatacgaggattagcccatggaaattatgtcgacactcagtccctttgaaaatattttaaatttcgttctactattgctcgtttcctatcccgttttaggcgcattcagctggctcatcggtgtcatttgttacaaagtcctctatcgctaccagcgcaaggagtttgaacccattgaaactaaggacgaaccgttcgtcacgattatgatcccggcccacaatgaagaggtcttaattgaacagaccatcacctatttaatgaacgacttgcattatcacaactacgaagtcctcgtgaccgatgatggttcaaccgatacgacccccgaaattctgcaacgactgcaaaccctctatcccaacttacgcgtcatcaccatcgaaaagaaccagggtaaagcccacgctttcaatatcggcgttggtttcgcgcgtggtgaatttatcctaagtaacgatgccgattcgattcccgaacccgatgccctttggaaatacatgaactatttcatgggtgaaacccaaatgaacatcgccgcggttaccgcgaatatggatgtccaaaaccggagtaccctattggctaaatcgcaaacggttgaatttgctagtatcgttggcgtcatcaaacgcagtcaggtcagcgctttgggtaacatgtacgcttacagtggcgccaacacgatgtaccgccgtgacgcgttaatcagcgttggtttattccggcaagatcgcgccactgaagatatcagcatcgcttgggaccaccaactcaatggttggacaaccagttttgcacccgacatcgtgttcttcatggacgtccccgaaaaattaaaaccgctctaccatcaacgaaaacggtgggctaaaggcggcaccgaagtcttgttaacgaacttcacgaagattttaggtcatcccatcaaacaattgaaaaagattccgttcattttagatcagacgctcagtatcttatggtcgttattcttcttcatctcaacaatcctctttatcttagctttcgtcggcttcttattcaccggcaattacgaacggatttatcacatgttctgcatggcctttatcttcgttagcttcgaaatggtcgccggcgttatgcagctgctagccgccgtgattgtcgacaatcgggctcacaaactgcgttacctgttcttcatgccgatttatatgatggtttattggcaggttaattcagttgccctcgtcacgaccttaatccccgcaattaaaacgattatgggttacggcagtgggacttggaaaagccccgtccgcaaccaacattagcgaattgtgaaaacacgctaagcaagttatgtgaattatcaaacaattatccggtaacgcttacaaaagtgctatactaatagtgaattaaagtgatgaaaggatgatttaacatgaataatattccacaagcattaggcccttattccgcatatcgccgcgccggtgatttagtgattacttccggacaaatcccattgaatccagcaacgaatgaagttgaagcaacaactgttgctgatcaggcgcaacaatgtttaacgaacatcgaagcgattttgaaacaagaaaatggtagtctagctgatgtcgttaaattcacggttttcatgactgatttatcacatttcgctgaaatcaacgaagtaatggctggccgtttacaagaaccttacccagcacgctccgcaattgaaatttcgaaactacctaaagatgttcaagttgaaattgaagcaattgcttatattaaagcttaattcgaaaaggtccatcattagaacgaaatattctaatgatggaccttttttggtacgataaatttaaataactgcttaatatccataactatatttgctataatcagtttagtatccacgatcgtttcaaaacaatcattcggaggtgcactaatgccgtcacaaaaacaaattatcaaacgaccaactattttagcatcctttcttatattattatgaaatcaaccatcgtttattcattattttaccttttagtcgtagtttcaattatcttaagtggttgtctgagtgtcattttaattggtctgggcctattgattagtactttaaagtcatcaaacaataatgatttcatttttattttcctcgccggaattccaatatttattttcttctttcaaatatttcaagatcttaattacaaaattattcaccaaaccggctattgggcgcggcggcaacccgtatttagtcaccgcggttttagttgccctaaatttattgaaaaacgctcgttgaccactgaacaacttgagctcatccagcaatctaaataccgctaccgcctattcgccattttacagtgggtcgttgcaaccatcgcggcagaaatcgttctagttttgtgcggactaatttcactggtcattcaagcgcactggttgattatcggtctaaccattttgagcatcgctgcaaccttattcggaactttctatttattagaaaaagtccagcgaaaaatgggattggccattgcttatgtcgaaaacgaacgtgaattttactacaaaaaataatatgaatcccaaccttcaaggagccagcaaaaatggcgcaaaaaaacactaaaattctagccaaccgaacccgcttaaccgcaactgataccgactatattgctaagttaaaatatggctacttaactaccctagtcgcggcacttagcttcaccggtattttaatactaagctacgtcttaagccaacatagcacgacctatttaagattattgaccctctatatggctgggctgcacggttttgtccgtacctgcttaatcatattagtgagtgtcattccgctttggttgtgccaagtatacgcaaagtttaacccgctcaaatcaatcttcttttttggtctatcactgattacaatcgggtttccagtcggcatcccggtcgttcggatgcccaccgttgtcgtcccagtcgcaatccaaacactcgctttaaccttattgttttgctcaattggaattatcactcataaagatttatcgaattggggttcgatactatcgattggtttattaggattactcctctcgacgtttttgaatcgtcaattcttacacctctcgttaataacgggcctactatcttatgcgacgatgcttatttttctaggttatctcatatttgatgccaatatcgcaatgaacagttacaccgaagctaaaaagctaggcggtctattcttaatcagtatcctattagccaattcattatcaattctacaagacatcatcgttctattttttgaacttctgggatctggtgattctgattcagatgatgattccggtggcttcgacagcttttggtaagcctactaatttctaaatcaaaacttaattcactcatgaggagcaactttatgtcgaaaaaaaacatcggtatcacaatgattatggggttattaatctgggattggggcgcaatcttgtttattagcatcttcacactaggcttaccaattgtcatcttaatattacccgggttatcagttctactgctgaccgctaaaaccgtcactggcttaattttcgccttaatttgcagcctaacgagtctgataccgttaatcatcacgattacttcgttacccttacgaagcttagtcacagaagccggtgaatacagtgttacaccagctatcattgcgcctttaatcatcgttgccacccttatttttttactatcctcgattaacttattcatcttacaatatcgaaccatcaaaaaagggttaccgaatgaccggtagccctttttcaattgatttaatttagtgcactacggattaaagactgctaacgttttcttcgtcgctttttgcgtcttcactaactgaccttgaatacaccaacggcgcaccgtgttatcacacgtaatcaacgtcaccattttcttgcctggcacatcgtcaatcactttgacatcgtatggactaattgattgtttgtaatcgaccttgtaagtgtagaccgattgcatatccgttaaatagaccttatcaccgactttaacgttctccaatggtaggaagatattagagaaagaatgcccggcaagtgcgtagttattgtccgcgcccatcttttgatcaggtttcatcgtcccgccaccttgggccatggtatcctctgagacgcccttcatgaccggtagcgccatgccaacacttggcacagcaactttacccagcacgatgacatcgcctttaacggccgcgtgaacaatctgtttcgtatcgagtgaatcaaccgctttaaaatcgaagttggcttttttatgttgatttttttgaatttgagccgccgtgacgtccatccgacgattggccatccaacggacgacttgggttctaattggaccactgaaaactaacagtaagccaataattaaaacgactgctagtatactattgataatccgatttttaactttttttgacatgttatttgaggcccttcatgattatttagggctattgtaccatattctaaagccccctgtcggctcggcaactcacggaatatttaacgcatttaatcagtcgtgatgggtctgcagttgcaatagtaaattagtccccgtcgcgatcgtcaccgagattaaaataatcgcaaaaccaattagcataatccccggtgcatcagtccgatcagcgacaaaatagaagaagggtaaactcaccatgtaaccgaccgtattccaaatcgcggcccgtctaatctgtcgcaaggcctgactggtcatcagcccaaaagaacccttcctagcgacttcattcaaaattcgaattaattgaaagccgctccatagaagcaggcccgtcatcccgtacaacaacaatccgaccaccccacctaaaataacgacccgcggtaaaaccgcggcgatattaacaattaaacgtggccaccagaaaacactcatcaataataacgggatattgatcaccaatagcgtcgcttttaaaaaccaaatttggactttcacaccaatcacctcaaacagtctctgactataatttaaacgtaaaagcccaaaacgccaattagattaagcggaatttaaagaaaatcagatacttgtatgttgctcgctctgcatttcttaacaagcaacacaataaatcttaccatgtggataattaactgtcaacaacttttttaaaaattattgattagcgaatcagacacacgttcatctctcgacgacatagaatatcttaccaccgtacgggagtaacgtcaatcacaaattacatatttttccaaaaaacttgtttttatgcataaatagctaaatacatcttttaaaatcttcataaactcactattgattatcttctaataactctttaacaacgcgtttagtttccgattattaaaaattggtatacctcaaattaaaaagaactaaaacaacttaaaaaaggccgtttttagcgatttaatcactaaaaacggccttttattcatttatttcaataaaaatcttcaaggttttcagaattcagaatgctaattgcccgtccttgccgttcaatcagacccgcttcttctaatttttttaattttcgcgataacgtttctggcgtagttccgataaaagtcgctagttcctttaacttcatcggaatcatcacttgcgtttgattggtcactttcattaaatctaataaataggtcgcaactcgcgattcaaccgattcgatattgattagattcgcctgtttttccaattgtgtcattttatcggcggcatcttctaataatgacaaactgattgtcgggtaggttaataacaattcttgaaacgcagtccgcgataacgtacatagcgtactgtcggtcaacgcctcaccataaatggtggtttcttgtttcgtaaacaaggccttctcaccctcaaaagcgccgggttccataatccgcaataattgttctttgccagtcgccgccaattgatagaccttaatctgacctttcgctagaatcaccaaccggtctgccatcaatgggctaaatacttgtgtgcctttagcgacgacctgatgttgggtgatctgcgaaatcttaactaagctgtcgtgatccaattggttaaaaatcggcactagttcggcacaaatatgttgcttttcaactgtcattaacccacttccttctatctattaatcgtcatcttcttctaaaccatcttgtggcgttagattcaataaactttgtaacactcggatttggtgttgattgcgccccaaaagatcgattaattcattggccaaagctaagcgattttctttttgcgctaatttaatcgcccgcgtcacaaatagattagccgttcgatagtcagctaccagttcagtcgtcatcatggccggcgtccaatatttaatccgcgcatcttcggttaacatcccgtattcctgatattcggcggtcgtcgtcggaatgacttccccttcatctaataatcgttgggcggttctctctaataataccccattttcgactaataaatcagccagtatgtttttgaacgccagacttgtcatactggtggcataccattccatctgttgtaactttcgttgttcaatcgctaagttcgccataatatggccaatcattgcacccgcagttggcgtgtgatgatcaacatcagcctgtttaatttcggcttggtacttggtttcaatcgttgttttatccatgattaaatcactcctacttcactttaatattttgaacggtgtaccccagattcgtgacaacttgtgctaattgttccggattcgtcgccgtttcatcgtattccgttttgactttactagcattgaacaacactttcacagttttgacgccgacctgctgttcaactgctgcttcaattttttgtaaacaggatggacatgagagttcatctaattgcatgactaattttgccattttaatgaccacctttctttgattaccctaaccatactgcaacctccccgattaaaaattgaccgtcatcaagttttatttaatcaggcgcatcgcattcaaaatcacgactaagatacttaattcgtgaaccaacatcccactggccatttgcactttgcctaaaatcaaaccaaccaataacaaagccactgttccgatagcaatcacaatattctgccgtaaattacgcgctgtacgccgcgccaattgcttggctttcaccaattcggtcaaggtcgattgcattaaaacgatatccgatgtttcaatggcgacatctgtcccagcacccatcgcgattccaatatccgccgttgctagtgacggactatcgttaatgccatctccgacaaaagcgaccgtttgtccttgcgcttgggcttttttaacaaacgtcaccttctcagctggcaataaattggcatggtattccgtaatacccactgcttgtgcgatatttcgagccgcttgatcgtgatcacccgtcaacaacattaaacgcttaaccccgttttgccgaagcgccgttaacatctcggccgcatccggtttaagcgtgtcggccaccccaattaataacgctaattgttgatcaattgcgactaacacaattgactgacccgctttttgggcactatcaatcgcccgcatctggtcttgggtcaacacaatccccgcttgcgtcaaaagtttcgcgcgaccaattcgaatcgtttgttgaccaactactgcttgaattcctaaacctttaaccgtttggctatcggtaatttccgatgtcatcgctaaagattgttgtgcgacgtaagtcacaatcgcttgcgctaatggatgatccgattgccgttcaactgcggcggcgattgctagcgctgcatttttatcagccgtaaacgatgtgacttgcgccaccgtcatcttcccccgcgttaaagtgccagttttatcaaaaatcacagtgtcgacgcccgccatcgtattaacgacttcgccacctttaatcagcaccccgttcttagcgccattaccaatgccagccacgattgaaaccggtgcgccaatcacgagtgcgcctggacaaccgaggactaaaatcgtaatcgctaatttaaaatcacgcgtcaccaaaccaatcaggattgccaacactaaaaccgctggtgtgtaataggtcgcaaaacggtcgataaagcgctcggcagttgactggctatcttgggcgtcttccaccaattcgataattttagcaaaagccgtatcatcgccgacttgatttgctaccacggtgatcgtgccattatcgactaaagagcccgaataaacagctgcgccaattgatttcgtgattaattgggcttccccggtaatgctggcttcattaacatacccggtcccggcaacgacttggccatcgaccggcacttgcgcccccgctctgactaaaactcgatcgccaaccgcaatctcatcgaccgcgaccgtttcgaattgatccgagcccacgattttaacggccgtttggggggccatcgcggctaacgaacgaatcgattcgcgcgtcttttttaacgtttgttgttctaaaaaaccgccgaataaaaataaccacgtcacaattgccgattcatgatattcgccgatgataaacgccccgatgaccgcaattgaaactaataaatcgatactaatcactttgaccttcaacgcttgatacgcttgcaacatgattggaatggcaccaataatcgacgccatcactaataaactgttcatgaaaccatttggcaaaccgaaccaatgcccaccataagcgccggcaatcaatagaccgctgactaacgcgatgtgatttttatgttgttgaaaccatttttgaatttgcatctgcattgccttccttctatctgaatgtccttattatagaaagaaacggctttttaataattgatggggatcaagtttacaaaaaaatagcactaaacccgattcattcatcagatttaatgctattaattattttccccacaaaaactgacccacttggtgatcgacttgagcattggcatgtagcgcgctatgttgggctttttctcccgttatcttgacttcgcgataacttttagcccgtccctgcaataaatacgcgagcgattgtgatgagacattgctgacccgaccatcggaatggctgccatcgcccaaatcaccataaatattcaaaatttgcagttgtttagctggcaccacttggcgtaaggctaatagctgccgataagtcgcattcattttgactggttcaccggacgccttcagtcgattctgattagcttgatcgtccattcccaaaatgccatcaaaatgaccggcgatattcacttgtttcgctaattgcggtagtttggcattttccgcattatttaataaataataagccaacgtgagattgcccatcgaatgcgcgacgacgttgaactgtttaaaatggtgttgctgattgactgcaaccaatacctttttaaaccaacgactcgtgatttgataattgccctgtttattattctgaaacaagacctggatgattggccgtttggtttgtgcgcgccaattcccgattagcgccacttgccccgttgaactgaccttggccgtcaacaccttggtcgcgtccttttgctgttctgccgctttaatcattcgattggtcgaattggcagtcccaccccaaccgtgcagataaaaagtcggtacttgattgcgcgcactgactttggttggtggcgtgttagcggcgaaataccaaccgagtaatccaacaatcactaaactccccagcatgattttaacccattttttcatcaattgatgcccccacaagcttttaaaaccactttagcacatctcaatccctaataaaaaaagaaggctcatggccttcttttttgtcgtccttaacggacaactaatactggaatcggtgcgtatttcgccatataggccgcttgactcccaaaatatttagcgactcccttttgcgattttgaaccgacaattaataaatcgggttggacttttggaatcacttggtcaatgattgtttcgcctggttcgccttccgcaatcaccacccgtacgttttgaacgccacgttgtaaggcttgattgcgataatttaaaacgtgcttttctaaatcagtatattcaccgtgcacaaaatccttattcaacgcttgataaacgttcatctcatcactttcaagaattgaaacaattactaattctaaattttcttttttcgcttcttcaatcgcgtagtcaaatgccattaacgcatctggtgaatcgtccacgcctactaaaatacggtgcattgccaccatcgtcatactgccaacctccccttatttttcagttgctaattgctgttcgaaccgctgattacctttacgcaattcaacaatcatccagactaataacgctaatacaccgacaatcaacacataggcaatatcatctgccaaagcgagttgcccgttagtggcttgatcaccgaagaaggcttcaatttgtcccggtaaaccaatcatattcaaatacgttaatccgatgacggacaaccagcccaaacctctaatcagtaaactgtttttgaaccggtcgcccatttcaacccgactatcggtaaacatcaataatggcaacattgaaaatggtaaggcaaacgctagaaagacttgcgaattattcatcaacgtattcaacgcttcgtgttcttcaactgccggcttaccgctcgttaacatgacacagattaaaaccggaatcaccgataacaaacgcgtcactaagcgccgcagccacaacggcattcttaaatgcacaaacccttccataattacttggccggttaaagtcccagtaatcgttgaattttgaccagaagccaacaacgcaaccgcgaatagtgtcgaaaggacacctgttcgcgcgacactggctaacaagccattgctcattgtcgatgtatcggataacgcttcaaacaatccgaagaacgatggatccttgactgcgccggttttgaaaaccgccacgcccataattaacaataaggcgttgacgaagaaggccatcgtcaattgaatattcgaatcccaagtcgaaaaacgaacggtttgagcgacctgttcttcgttatgacgatcaattttccgcgtttgtgacactgcggaatgcaaatacagattatgcggcataaccgtcgcaccgataattcccaaagcaccggttagtggtgtttgaccaccaatatgtttagtggtcgaaaaagtttgggcgttcgggactaaacctttgatgaccccattccaatcaggattggacaaggcgacttcgtaggcaaagaccacaaaaatcacgacaatcaaagcgacgacgattgcttcaattttccgaaaaccaattttggttaataataataagagcatgacatctaaaaccgtaatgaacaccgcaatcatcagcggtatcccgaataataaatacagggcaatcgcggccccaatgacttcggcaatatccgtcgccataatcgccaattccgttaaaatccataaaacaatgcctaatgacttactcgtacgcgcccgaatcgcttgcgccaagtccatctgagttacaatgcctagtttagccgccatatattgaagcaacatcgcgattaaactagacattaaaatcacggacatcagtaagtattggaaattttgacccccggtaatcgacgttgaccaattccccggatccatataccccactgccactaacgcacccggtcctgaataagccaataatagcttccaaaaacctttaccttctggtacttcaacggttccattaatttcttctagcgatggcccgttggcatattcaatcagcttatgtttctttggtgcttttgttgcggtcattcatcccacttccttacatcccatttgtctacgacatccttattgtacgccgttttaatcagatgtaaagaatatttttagtaatgcttaacttttatattttattttataacaaataaggcattattaaactaaaaaagagtgtccctcgtttgaggaccactcttttcaactagaataagacaaacgcaaccttggtgatcaacgttagtccgtagccaataataatcaaagcgctgatcagattgacccacatcaagaacttcggcgagaccttatctctaaaaatactgaatagaatcgcaatcccgaagaaccaactagcggttgccattaagacacccaccataaacggcaatgtttgactcgccgtcatatcaccgcgcaacgcgcccaacatcaaggtgccatcaatcaacgcttgcggattaccccaaacggcaacaaaggccgtcaagatgacttttttaagcggcatggcttgtagcgaaccgaattcaacggcggctcgggcactgcgaataatcgtgtagccaatccacaagattaatagcccaccaatgcccataatcgctaatttgaccatttcatttttaataattaaagcgccaatcccgtaaaaggccactaatgaaaataaagcgtcaaaaaaccaaataaacagactgttcaaaacagcgcgcttggtggtattggataaggcgttattaaaaacaaaaatattctgcatcccaatcggtgcgacaaacgcaaaaccaattaacatcccttttaaaaaaatcatcatacgaccccttttctaacccttaattaaatacttttctgcgggttcaactgtaaaatcgtcagtgtccccaacaagcataatgcagaaataataatcgtgtgttcacctagccaggcgaccatcaagccgaccacgactgcccccaatgtaaaactaaccattattctaaaaatctcccacgccttggcaatcgctaatggattcttcttcgaaaccccatcgtacaagctttccgctaaggtccggacgttaccggtcatcattaacgacgtaaacggtgtccctttgagttggcggaattcttgtaattgtgccgcggcaaccattgataccagtgcgctcgataataaatcagagacgtatggcgaaaccaccgccacgatggttaaaaccaagacttcaatccctaaaacaatccgttgacgcttattaatcgagtcttcagccttaaaacgatgttgtaacatcctggttaaaattgtcccaaccataaacgccaagaccggcgtcatatgttgtaataaaacgccccatttcatttgacctagatgcgtccctagtagaatgagattccccgtttgtaaccccgcaaaaacttccccgtgaactaaataggtgtatgaatcaaacccaccggcagctgcaagcaagcccccatacaataatttgtcgcttaaaaccattctttctgtcattcagatattcgactcctcaaatcaaactataaacttctactctatctgaatttgagcggttagtctagtcactaaacgttttcaaataaataaatcgcttctatcctctagtattactatcattagttgcattcattcgccaataccgccgcaccatttttcaatgttataacgcagactcaattgatggatttcatcataaactcaatagctatatacctgtaaaggcttgcccttaatggggtagtttgctatttgacgctttattaggaagccacaaataacggttatttcccctataaatacgcataaatttcaacgcacaaaaaaggagtggatttctccactccttaaaagtctaacttttggggttactacaattcatcttaattctttttgtataggcggctatcttcttttataaagaacgaatccagtaaatcctaagatagttgcaccgattacagtcagaattttttcttgggtttgattttcacccgtttgtggcagattaccttgattatgtttgttgttagtatctttatctttatttttgtctgtatttttgtctgtatctttatctgtatcaggtttaggtgttggtgttggagcaggagttgtttttacttcttttaatgcactgaaagcggtattcaagtcagatgttacttgatcaatttcagcttgtgtggcattggcgttagccaaaacagcttccgcggcttgcaatttatcttttaaagcttgctgcgtctcggcggtgaattcatacccatcttttgctttggcagccttagcttgatcaatagccacttgtaattcggttgtcgttggaattgcttcttcaacaacgttggaaatcgctgcctttaaatcgagcgttacgttatcgacttctgtttgtgtggccgctgcttttttatccaaaacgctttgagctgtttttaagactgtttttagattagcctttgtttctgctgtgaaccgatttcccgcagtaggcgttaagttagtgcccttagtaatgtaatcctgtaattccatcgttgaaacggtataaacgaaatttgtaacttcagtatggtaggttaaccgatcatacgccatggaaactccgtggggaccatctttgatcagaacttttttcttgtatacggcaggggaggcctcaaataatggattaaccatttctgttggcacaaaatcgtcgttgtcaccatgaatgaaaagctgtggtaaggtattcttcttgacttggttgatcgatgacatttcatctatacttataccagcttgttcttgtagttcatcactggcaatttttattgcagcgtttaatcgatcaataccgtgaatttcaagtagggttctattcacaagaggtacttttaaattttgtccaagatagcttatttcgtccgaaacagaagtgtaaccacaatcttcaataacagcacgaacattttctggaagatcttcgccgccagtcatcatgacagtcgctgcccccatgctgaccccttgtaaaacgatatcggtatcttgaccggttgtctcaatcatttgttgaatccaacctttgtagtcgttccgttcggcccatccaaaagtaatgattcgtccttcactttcaccatgtgaacgggcatcaggagcgagaatattataacctaaatcataatacattttagcccatgaagccgcgtcgttattagaaccgtgataaccatgtgcaatgattgctgtttttttagagtttccatttttaatatatttagccgacagtttaagaccatcgtcggattgccgcgtaatggtttctgttgggatttgtgagaaccagttatgatcttcaaccatgccgccgtaatctggtgcagttgtaatatctccaccaccaccaaggtttatatcgaaggagtcgcgaataaagaatagtttaaaaaattcgtgtcccagttcttcgataggggttttcgcactcataattttccaaatgtcaacattatcatttgggtctacagccttcgaattattaacagccgcttccaactgactaatttgattcgctgaaagcccgtctaattcggtatcccccgagttgacgacggttgtgtctgcggatgtaacgttttctgcatgagcaatcgattgttgcgtgcctaaacttaaactaaataaaaatatacctaaccccaatccccatttccaattcttcatgataacaactcctttttttatttaggccaactataccacttagatgaaagcgattacacacccctatcctgacaatatttaccataatcgcttaagtttgtttaggtcgttaaatggatcactaaactatgatgcgctcctcggcaagtggacacgataatataataaaatatttatcaaactgtttgccgatttcagtaaacagttttcttatctttcttttaggacgaattatcaattcaaatacaaaaaatatgtaaataaggagtacacttcattatgaaacaacggattaaaataacccccacagataaaattaaaactgttgggataaatattgattgacacaatctttttcagttaacccccggaggtttcttcctatgtatacccatcaaacatttctcaatgatttaatcgctaaccaaagtacgcgttccaaacagttgctagcttatggttttcagcagaccgcgaccggggattatcgttaccaaaccaccattctcgatcaacaattcaccttaacggttttgttaacggtcgatcagcaactgacaacccaaattacggataatacaaccggattgccttacccaccttaccaatcggaacaagcgactggcccgttcgtcagtcaattacgccaaaccgtgcgtcaacagattgaacaactggcggccagttgctttcaggtgacgatttttagccaaccggcaacgctcgcacttttggaatacactcaccagcaatacgcgaatcagcccgaatttctatgggctaaatcgccgcaaaatgccgttttacggcgacgtgattcacataaatggtacgcggccattctagttatctctaagcgcaaacttggcttggacagcgatgaaatcgtcgaaattcttgatgtccgggtcgaccctgccatcctgccggccttgattgacaaccaacggttcttccccgcttatcatatgaataaaactcattggttaacgattatcctagatcaaaatacaccacttgaaatgttggaacactacctcgatcaaagttatcaattggctaaataatcattggcaacaatcattaattactaatgctggcgacgctgcccaattcgggctagtcgccttttttaattgcccacaatgtaatgttgccagtctttaacaataatcatttttcgtgcatctcactttttaaacatgctacactataattaataacttattaattggaggccttaatgatatttaatcgcgagctattacacgaccgcaccgttatcaaagttgaaattctaacgttgattcgtgatcaacccaacagttggactcaaagcgccttagcacaagaattcaactgcagtcgtaaactcattaatacctacctgactgaaatcaatcaattagcccaaacttggcttgaccaaactttaattcaacgtcattcaactttacatcaattggtcattgctggcccccatcaacatttgaacagtttgctaattcgcgctcacctattggcggctgacagcaatgttcaactgttgttattgctcatgcaatccactaaactcacgaccctcgaaatttgtcaccaactctacatcagtgaatcctgtctccataaaaaaatggcccttttacggaaccacttagctccctatgcactttcaatcaaaaaacgaacgggtcattaccggcttagcgggaacgcttttcaattgatggcctattttctagaattcttcagaaccggttttaattatcaaatttggccgtttaccaatagttcacaaacagtggtcaccgctagtttgcgcttatttttcgaaggtgaaaaaatccatttaacaaaaacccaactgacccattacagctttttagtcgggctattacgttgccaacccatgcacattaaagaaaccacggaacgcgccttatccactgaaaacaaaaccgttaaccagcaactattaaactgtttcaaacccagtcgccttacactattagttgcccaattaaacctcagccccaccgacctcaatttatttctctgttacagccagactagggacgatttttatttgattaaacaattcaaccacgttgccttaaaccaacatcaaatcgtcgattccgatgagcatcaattaatcgatctttttaaggcgcaaattctccccttattcaccgtccaaggattaacggctgatacccaagcgctgccaagtctgttagccattaattacgccttcatcctcgccaaacggtttcaggttgcgtttccgttgctaactaaacatcatgtgcaatcacccgtggcgacttctaatccaatccaacaaatcagccaaacgattcatacttttattcattttgaaaaaaaccgccccacccatttattaatggaacaactagcgactcgctatcatgaacttttgacccatttttttaagcttgagaaaccaacaccgtgctttaaagttagtctatttggctacgattcccaccatgattaccatgtcgtccaggccctcattgaacaacgttttaaaagcttattttcttttactttcgttgccaatccgcatcgtgagcaaccggctgatcttttattttttaatccccatcacggaccacccgctaatcatcattcgccgattcccgtcacaagccaagtcacctttcaagattgtcaacgaatccacgatgcgttaattcagttaccgcaaggtcattaaacccaccaaaaaagccgaattgtgctgattcggctttttttgatgaatttctattcaattaacgacgccgacgccaaatgaggctgccaccgccaatcactaacgcaccaattgagacgctacccaataaccaataccattgctgattcttagtcgtttgtttggcttgatttggcgttggttgtttcaacggtactcgataaccggtcactagcaatcgatgactgttgaccgtatacggcgtacaagtcaccaacgttactaaatcttgacccggttgcacttccaaacctttcaaattcgatggtttcacgattcgtttggttttaacttggtaagccaattgtttacctaatacctctatatagaaccggtcacctttttttaattgatttaatttagtcagtaacacccgattcggcaacccattatgtcccataataactgaatgggtatcttgcccaccaattggatacgaggtgccttgcaataaagtcacccctttttcgagtaattctgggttggtccgatcaaataatggtaattgactcttgatttttggaatcgacaaactgcctaataaacgttcttcaaaatactgccgattaaggtcatttttagccaccgtcgcggttaaggggtcctccccttgtttgggcacaccacctaaatcttttaacgcttgatttcgtttttttaatgcttgcaatcgtttctgtcgcacctgaccattggtttggttcattttttgttgaaaccgttcaatcctaatctggtctaattgattattgacgaaactcaccacaaagggataacaaaagatgagcaatccggtaataaataaagtaataatcacccattttaactttttggcacttaaacgcgatttctcttgttttttcattggcttaattcctgattaacgttttactttacgattccagaagtaggccccgcccattagcattaacccaactacaacgaaggcgtagataccaatgctaccggtttgtggtaaaaaaccacctttgcgaatattttcaaatttgatggtctccgttccaaattggccagcaaccactgtgaaatctttcgtcggtcgattattctcatttaacaaataaccatttggcgccttaacttcaatcaatgagtgattaccattagctaaaccgacaaccgacaactgaccattattcccagaactaattttagtcgcttgtgcttcatcagaaacccatgtatcgaatagatacgtatccgtttggtcttgtttaaacatcgcgaattgatcaccctttttaacaacaaactgggcaccagctaatcctttatccgtttgtgcatcaattttcttgaattttttgccacccgttaccgttttaacgattaaatctgttcctggttgattattaacactgatagttgctttattttgaatcacttgatccggatcaacacttgccgtcagctgcattggataagtcactaacaatttttgacccgctaattgtttaacgttaggggcatccgttttcaaagcaatctcaaacccattattagttgctgcaatcgtgtagtccgtaccctgcactaaatcgcccaccttaacggctgctaaatcagctaacgctaacccgttactaggtgcatcctgaataacaaaagactggacattagcttccgcaatatttaccggaatattaaccgtcaatgcgtagtttaaaagagcaccactactcacgttcggatatttagtcccgttaaagtcaacttcagtaaaatcagcttgattcgttaacaccttttgatcttcgccagtttcattcttaggatagagatgaatctgactattaatggtggttgttcctggtttatagactggcatgacaacgaccattggtacagcttttttagtgatggtaggtgttagtggcgtcgttgtttctaataggagatatgcggcatactgtcccgccttatgcagtggcagttccgcaaaagttgcactaccgtcacccgtcgtcattttctcagtgccgattggtgttgcataactcggtgccacgctaaccgatttaccttgaatcgctgcaactgcggcagtgactgcctcttcgctatgttgatcacctaattttttgtaatattcagttgtcacgtcgtaaacactaaaaccggcaccgttcaacgccgtgccaccaaaatccatgatttcacccgtattttggataggatccggtgtttctccttctgaaaaaacccgtttatggaccgtaatctgggcggtatccgggactgttgtctccgcatttaccgccccaatccccactaggctggacgctaacaaagttgttgccatcaataacttaatcaatcttgatttcatattggtttcctcctattgtttgtctgtcgaccgtcttttatgccgaacatagtaataaccgcttaagattaacgcagcaacaattaacgcaacggcccaatattgatactgacgccagccagtaccgcctgtcgccggtagataaccaccttctggcatattatcaagcgttaattgaattgcttgattctttaattcaacttgtgtaaaggctaggccatctttagtgacggttacttgaccatcttgatctaacactacttttaaaaccgacgtcgatacaatatagcccactggtgctttagtttctttaacatggtatgtttggtcggccttcaacggataagtagttcccgccgcattcttgaattgaccttggccatcactttcggtcactaacgtagcgactgataccatctgtgcatcgtagagtgtaaattctgcaccggctaaaaccttttgcgtattgctatcccgttttaacagattcaaatcaaacggtttccggtgattcactaggaccccgttagtacctgaagtcgtaatttgccaataatcatcctgttcattaactgataacgccactgcttttccagcattgtcagttaacgttgcttcatgattatcattgatggatagtgtccacggctgttgggttgcactttcatatcccagtggtgcatgcgtttccgtcaatacgtaatcgccaacttttattttagtgttaaaaataatttttccttgttcgttagaaatggtggttcccactagtgtcccgcctttagtccttaattcaaaagccgcaccggctagtggtcgtccaaattcatcatgcttttcaagcgccaactggtacggttttggatcactgcggacagcgggtactgcgaaatacatattgttgccattaccgttggttagatatgtggtctcatttgccgggtaaaagagcccgttacggtaagcttcctttaacgtcacgttatacgtgatccgatacccttggcgctcatcttgattggcacctaggttgagattagtcagtttaacgatattcccagaggtaatcgttggctggctgacactgcttgtatcgctcgtcaattgaccggcgtttaacactaaattgaccccttttagcgaacccggaacaaaatcgacaaactgactcagtggatcagtgacgtccgcagctgcaatcgttgcaatcaatctatcaataatgttttgtaaggcagttgccaatgattcaatcgctgctacgttatacgtcccttccggaccaagtgcacccacaacggcattggcagttgtgcctgtatgataaccaatcccatagcggtggagattcgcatccgccaattggccataacgattattgataaactcaaccgttggcggattgctcactatagtaccgttaccgctgtatagagtcgtttcttgggcgaccatcttcaaaacactgttattcgttctagccgaagaagctaggcgactcagtgagaggtcaagcgaattgccactagtgtacgcattgtccggtgaaaaagttggttcgccgtcggtaatcgtgattaacactttataagcatcggcgcgcgcaccgtaatcagcattcgtcaataacttaatcccagcatcaacccctaagaatgttggtgttccggaggtttgaatgttctcggttaaaagcgtatggcccattagcgcactttgactagtcgtaaagccgtcaaattgatcgctatttgcttgctcattaaacgccgaaatttcaccatatggtcgacgactatttccgatttctgtcgaaccaaaagcggctagtccaatttggatatcgcgattatcagttaacatatcacttgaaaattcattaaccgcttcttttaaatcttgccaacgcgtattgccggaggtagtggtggtattcatactaccagacttatcaagtaccaaaacaatatcaattttaggcaccggctgaaccgcgtccccgatcatatccaactgaactttaaattggttagcagtggccgtcggttgaattgtctttttcaaattggcccgaccagctgtcgcacttccatattcatggtaaccatcttcaaacgacagcgcatcgctctttaaatcatactgagcaataccgctagccgtttcttgtaacccgtaatgataattttttaagaattgagaagtcgttgaactgcctaaatagtgattgatcccgctagtcgcataagtcccgagttcatcggttgtatacccaaacggatcactaatcgcacgcgtaaccgccgtcatttttggcagacccttaacggcccgagttgccgctagattcaagctaccactaactggcgccgcttctgcaacctcagtttgctgaggcatactagccgttgtctgatttttcgactgggttacagacgatgtcgaattcgattgactactactcgtctgctgactatcatctgttgggttactcactagacttgtgatctggtgaggtccggcaatgtcaggtgccaaaatatcttcggtcatcgtttgatcaagttggacagtaaccgctaactccggcgttgccgtaactagttcaaggcgtcctttagcggtggctgtgaattctttttccaacaaccaatcagcttgtcgttcaaattgttcatgagcaaccggctgactgtcggtcggaatattcaatttcaatttgagttgttcatttggcgtcgtttttttctcataatcaatcaaccaatgaacaccatccacctgttggacagactgtgcactgacttttaactgttcagtatcaagtaacacttgctgttgtgcttcaaccgcattgacctgttcaggatgcagcaataaactgttacccaatgtcgaaatcaataatgtcagtagcatcagccatttaaaaattggcatcaaatacttcatacatgtctcctccttatctaacgtaatggtgttagctttattctaacggggtgcaacttacatttattattcaaaaggtaacatccgttgggtcaaaatgaacgcaaaaaaaagacttgtcagttgacaagtcttttggttataatatttgaattttatctgtggatgtaagtgaatgctgaagcacctgagacagtttgggtattaggaccaccaggactgtcaaagcccatcccaccttgagtgatggtaatggtgttgctagcggcattgtatgattgaacgtaagcaacgtgaccgtatgaaccagcagcagcccatgaaccgaccatttgaccaccagcaaagctgacgattgcaccagcagcaggtgagttattcaccgtgaagccttcagcagcagctgaagcgccccattggttaccattgccccagccgttaccagcccatgatgcaactgatttaacgtaccaagtacattggccccaagcataagagttaccagcagaattgctagaagattgagtccctgaaccgtttgaagtaacgggtgttgcagccgcaggtgtgctttcgctagtcgttgtcgtcgtcgttgccttagcagcagttacaacggcaactttcgcagcggcagccttagctgattcttcggcgtttgcttgatcatatttactttgtaaagcttctaattgatctttattatctgtaattttttggtttaaggcagcttcttttttgcttgcttcagcctttaaatcagttaagtttgttttttcagtttctaggctggctttagtgtttactaaagttgtcttagttgattcttgatcattttttaaagtcgttaaacttgatttagcatcgttaacatcagctaaagccgttttacttgcttggtttaatttattgacagtcattgaacgtgacacaaggtcagcaaaatcatttgagtttaataagaaatcgatgtagacatttccactaacggcatcgccacttgtcttttgtaaagaaaccaattggctcttcaagacagcagtccgtttagtgacttcttgttgggcttgattgatttggcctgaaagacttgcgattttagtcgtcgcatctttgatggctgtttcttgttcagtaatcttgcttgagtttgtgctgatttgttgatcaagcttgatgttttcagtgttagcagttgcgatttgttttaataaatcgtcagtactactttcattagctgaaatttctgttttagcatccgttgctgaactagcagccgcaggaacgactggtaaaatactgatgcctaatactccgattgctagtacgctcataattgactttttcaatgacatttaaattaatctcctatactgagttgctgttctttatccttcaccagtatagaacttgattgttacatttacattacacccatattatgttcatttaacaaaaaatgataaccctataaaccatttctactagttaataccgttaatcttgaagaatcttgcgaatccaccgttgcgaataatcgtatttcttagttaacgccactaaattctggccatcatattcctttttaattcgttgcgcaacctgctgccgatcatacagccgcatgggaaaagagatttgtcgcccccgataaatctcgtaaatctgacacaatgtttcttcgtccacgatttcaaataattccgcatatgattcttgtaatatttcagtttcaattggcatccccaaaacccactttcccgattcacttgtttattcgataatcctaatttacactgtttgatagacacatttagtctatctgctttcaagctaaggatttttgcaaaacaaataactcgtttttaaggagacgcttatgaatgccgcttatcgtcaactcaccattttccaaaatttaatgaatggtcaactcgtcacaaaaagtgaactggttacccaattcgccgttaatccacgagtgattcaacgtgatttcagccaattgaaacaattcatcgccgaccaacaattaccttatcagctcgcctatcaccgcgacttagggggctaccaactcactagtcaacaagatgacctatccaagcaaacgatcttggtcctgattaaagtattgttggccagtcgctcgttgacaaaaagcgaactcgatcaaacgattaccggcttactgaaactgattaaaccagccgatcgtcaagcgattgaaccgattattaaaaatgaacaatttcattacatccccgttcatcaccaaaaaccgttattacaattaatttggcaattcagccaactgattcttaaaaagcagaccatcacgattcactaccaacgccaacatggcgagattgttgaacggacgattttaccggaagcaattatttgttccgagtactattattatctaatttcctataacgctaaatatcaaagcaaccttttctaccgtatcgaccgaattcaggattggcatcccgctgctaacccgattagtcggacctatgcgcagcgtttcgaagatggcccactccgccagaacacccactacatgcaacccggcaaattaaccagcattcaatttgaattctgggggatcgtcgaagccgccctcgaccgtttcccgaacgccacaataaaagcacgctaccaaaaacgcggtagcgtgctgattgaaactgaagcttatgatcgtggcgccctaatgtggctactcagccaaggcccactagtgaaagtggtggcaccgacggaattcgtggagatggtgaaggagagcttgatggagagtttaaagaactattgactcaatatcaaacaaataaaccttcatgatttttcattgcattgataacttcatcttctggaatttctcgatttttaaatttttctataacagtgttaaccaataattcgtgaatataaactcttggtttttttgatgcaaacatttctttaaataaattactagcatttttcccatcaaatattattttttggatattttttgtgcctatttttaaaatgagtaaacgatgattataaatgagtgtattcacataataaccgttattgtaacggactttttctaatcagctaaacacgaacgttgatttgatagtaaaaataaattagagaaatttaatctttcttatttacttttcatttttattcaggtattattatttttaacaactgaagggagtgtccatatgagacgagaaaagagtttggtgttaggggtaacaacattggccattacggtcttattagcagcgtgtggttcatcagggagtaaggaggcgtcaaccgatacggtgacgtttacgacaaccgatgtgatttccacgatggattcagcattaaataccgatgtaatcggtgcgcaagctttaacggacacgatggaaggtctttaccgttatgaaggtaagacggttaaaccggcgattgcgactaaggtggttaaaccaaccaacaatggtttaacgtacacgattccgctccgtaaagatgcgaaatggagtaacggtaaagcagtgactgccgccgattttgtttacgcttggcaacgggtcgttaatccgaaagtcggatcacaatatgcttacatctatgaaggtatcaagaatgcaacggatatcacagccggtaaaaaagcagttgatacattagggattgaagctaaagatgcgcataccttggtgattactttagataaaccaattccatacttcagtcaattaatgaccagctcaactttcttcccagtttataaagcagccgttgaaaaagcgggtaaagcttacggaacaaattctaagacattagttttcaatggcccttacaagttatctaactggaatggtccggatagctcttggaaagaagtcaagaatacgaattactggaatgccaaagatgttaaagtcaagaacttgaaataccaagtggttaaggatccatcaacggctttgaacttattccaaagtaaaaaagttgatcggactgtgattactggtgatacggctaaacaaatgaagaatgatcctgattattcaacattaccaaaatcagcaacgttctatatgcaattaaatcaagataaaaatccaatcttcaaaaatgctaagatcagacaagccatttcgatgacgattgatcgtgaagaacttgcttcacaagtcttaggtgatggttctaaagcaatcagttcgataacgcctaaaaacatggcttataacccaacgactgataaagattttaccagtgaattgagtgcagccgggcttaagaacgcgacttataatcctaaggaagccgctaaactttggaaagaaggtttagctgaattaggtcaaactggcaaaacatttaattacacaatgctcagtgatgacacggatatcgctaagaaacggtctgaatatttacaaaatacgcttgaaaagaatctgtcaggtttgaaagtcacattagcgaacgtgccatttaagacgcgtctttctcgctcagatagtggcgatttcgatttggcggtaagtgcctggaatgctgatttcccagatccaattacgttcttagacctcttcgtgacagatggttctaataataacggacactggagtaacgcagaatacgatgcacaaattacagcaagtaaaacaaccaatgccaataacccaacggctagatggcaaaacctattaaaagcacaagatattatgaatactgaatcaggggtcatcccattgtatcaagttggtacagcgtacttgacaaatgctaatgtcaaagggttagactacggtccatctggtaattataataatgtctcactttatttaaaaaaataaaacgactttataaaatgggtttcggcgttgaaaaacaatgaagcccgtttttgttaggagcaatcatatgactaaatatctaattaaacgaatatgctatctagttttaaccctgttcattgttgcttcagtcacgttcttcatgatgaagttaatgccggggacaccgtacacgaatcaagaaaaattaagtgcggatcaattacggattatgaatgaacaatacgggttaaataaaccgattctagaacaatattggatctacattgtcggtttattgcacggtgattttgggacgtccttccaatttaataatcaaccagtcttgagtttaatcatgtcacggctagcaccttccttacaaatcggggcccaagcgatgattctgggttctattttaggcgttttattaggggctgtggcagccattcggaagaatacctgggtggatggggtcgcaacgttcttttcaatcttagggatttcaattcctaactttgtcttggccgttttacttcaattcttcttagccttcaaattacagatgttcccaatcgctttatgggacggcttctcatcaagtattttaccgacgttggccttagcggtcgcgccactggctaacacggcccggttcatgcggactgaaatggtggatgttttgagcagtgattacatcgaattagccaaagccaaagggaattctagatggcaaacagtggctaaacacgccctacggaattcaatgattccggtcgtgacgattatcggaccaatggctgtcaacctcatgacagggtcattggttgttgaaaatatcttctccattcctgggattggggaacaattcgtgaaatcaattatgaccaacgattatccaaccatcatgggcttgacgattttctattcattcttattaatggtgattatcttagtcgttgatattctatacggcattatcgatccaagaattcgattaagtgaaaagggggccaactaacatgtcagatacaaaaataacagctggttcttttaaaccgctcaaagtagataatcatgaagaacaagaaaaaattagtgcaccttcattgacgtttacgcaagatgcgattcggcgtctgaagcaaaataaagtggccgttgtttcgttctttgttctgttggtcattatcctcgcggcgtttttagcccccgtgattgcaccacaaagtccgaacacgcaaaacgtggcctacgccaatttgccacctaaaatcggtaacggtcatttacctggtttcaaggggacagcgacggtttccggcgtgacggttgataagtatcaacaagccggtgtgcccaaaggtaaaagtttcatcttaggcacggattatctcggtcgtgatttattgtcccggattctatacgggacacgtttatccctattaatcgggattttagcaaccttagtcgatttattaattgggattccatacgggattatttccggttggaaaggcggccgaactgatacgtttatgcaacggattatcgaaatcatttcatcgattccgaacttaatcgtcgttgtattgatgatgttaatcttacggccaggcttgctatcaattgtgttggccattggtttcaccgggtggattacgatggcccggctgattcgagcccagaccttccaattaaaggaacaggaattcgttttagcggcccggactttgggtgaaaccccgacgcgaattgcctggaaacatctaattccgaatttatcctcaaccattatcattcaaacgatgttcacgattccgagtgccattttcttcgaagccttcttaagcttcatcggaattgggattccagcaccaagcgcttcattagggacgttattatcggacgggcaaaaggccttccggttcttaccgtaccaaatgtggtatccagcagcggtcctatgtctcatcatggtcgcagtcaatctattagcagatggcttacgggatgcatttgatcctaagtcatagtcggaggttttcaaatggcaaatattttagaagttaaaaatttaagcatcgattttaaaacctacgcaggcgatgttcatgcgattcgtgatgtgagttttgaattgaaaaaaggcgagaccctcgcaattgtcggtgaatctggttcgggtaaatccgtgacggttcggagtatcatgggtctattggctagcaacgcgcaagttaaaggtggcacggttaaataccatggtgacgatttattgaagaaacccgaaaaggaaatgaatcaaattcggggcaacgaaatttcgatgattttccaagatccgatgacctcattggatcccaccatgccaatcggcaaacaagtcgctgaaccgctattgattcacaaagcgatgaacaaagaagatgcgatgaaacgggcactaacggttttagatttagttgggattccaaacgccaaagaacggatgaaagactatccacaccaattttcaggcgggcaacgccaacggattgtgattgcgattgcgattgttgattatccacaagtcttaattgccgatgaaccgacgacggcgttggacgttaccgttcaggcccaaatcattgatttgatgaaggaattgcaacggaagattgaaacgtcgattatctttatcacccatgatttaggggttgtggccgggattgccgaccgcgtggctgtcatgtacgccggtaagattgttgaatatgggatggtcgatgagattttctatcaaccaaaacatccgtatacgtgggggctattgaattcaatgccgacgttagatacttcgggtaagcttgaagcaattccggggacaccgcctgatttgctcgatccacctaagggggacgcgtttgctccgcgtaatccgtacgcgctacagattgatgctgaacagatgccaccgttcttccaggtgtctaaaacccattatgcggcgacttggttattgcatcctgatgcaccgcaagttgaaccacccgcagcgattaaaacgttgatggctaaatatgatgaagtcgcaccacagaaggtaggtcagacagatggaaaaggataaaccgaaagtattagtcagtgttaaacatttaaaacaatactttaacccaggtaaaaaatcagaggttaaagcgattgatgatatatcgtttgaaatctacgaaggtgaaacgtttggcctagttggtgaatctggttccgggaaaagtacgactggtcggagtatcattcgtctctataatccgacgagtggtgaaattctgtttgacggtcaagatatcagtaaaattaagaatcatagtcgtcaaatgaaagaattcagaaaagagattcaaatgattttccaagatccgtacgcgtctttgaatccgcgaatgaaagtcaaagacatcattgctgaaggactccacattcataaattggtgaaaaccgaagcggaatgtgatgcccgggtcaatgaattattggaccttgtcggattaaacaaagatcacgcgactcgttatccccatgaattctcaggtggtcagcgccaaagaatcggaattgcccgggctctggcggttaaaccgaaattcatcatcgctgatgaaccgatttcagcgctcgatgtgtcgattcaagcgcaggtcgtcaatttattgaaggatattcaagcccaacaaaatttaacgtatttattcattgcgcatgatttatcgatggttaaatacatcagtgaccggattgccgtgatgcataatggtcagattatggaattggcatccgccgatgatatctatgaccgaccattgcatccgtatacccaaagtctattgtcagccgtgccccaaccagatcctaagttggaacggaagcaacgacgggtggcttacgatgcgtcaattgaagccaataacgaaggtcgtcaattacgtgaagttgcgcccgcgcattttgtctatgccaccgaagctgaagtgccgggttatcaagcggctttagcgaaaatgacacaagcaacgacgatcgcgcaatagcatttcaaatagactaacgccgattaaacggtgttagtctattttattaacggacaaaattagatgagaattaaagggtctaactcagaccaacgctgtttttttatcagtataaacggtataatagtgaaagattataatcaggtgaaatggggtattttattttggatgcagcactagtcagcgagcttcgtgcgcgctacggcattgaatttcaaaacttagcaatcttagacgaggcgtttacgcactcttcttacgtcaacgaacaccgcgaactcggtttgcgcgataatgaacgtttagaatttttaggcgatgcggtgatggaaattaccgtttccgaatacctctttcaaaaatatccagactggccagaaggtaagttaacgcgattacgggccgcaattgtttgtaccaagagttttagtagcttctccaaagaagcccattttgaccggtacattcgcttaggcaagggtgaagaaaagaatggtgcccgggcacgcgcaactttgttagaagatttattcgaagcgtttaacggggctttattcttagatcagggtcgcggtgcggtcgttaaattcgtcgaacaactggttttccccaagattgaagccggcgaattttcagatcaaaccgattataaaaccaacttgcaagaatttttacaacaagacggtgaaatcgaaattgattatcaattgttagctgaagtggggccatcacacgatcgccaattcgaagttgacgtaattgtcgatcataaggtattaggctcaggggttggtcgcaataaaaaagcggcggaacaagcggccgctaaaaaagcattatcacaattaaaatagtgttcatcagtcacacggtgtagggagtttagtgcatgcagttaaaatcattagtgctatcggggtttaaatcattcgccgataaaacagaaatcaatttttcagacggtttgaccggaattgtgggtcctaacgggagcggtaaaagtaatatcacagaagccattcgctgggcgatgggtgagcaatcagccaaaagtctacggggcgaaagaatgccagatattatttttgccgggaccgatttacggcctcaattgaatcgggctgaagtgacgttaaactttgataatagtgatcaatatttaccgcaagagccggccaacgtcatgattacgcgacgtttatttcggaatggtgatagcgaattttatttgaatcaaaaaagttgccgattgaaagatatcgtcaacttatttatggattccggcctggggcgggaatccttttcaattatttcgcaagggcgcgttgaagccatttttaacagcaaacctgaggatcgccgaaatatcatcgaagaagccgccggtgttttgaaatacaaacaacaaaagaaaaaggcgcaatcggaattagaccaaaccgatgataatttaaaccgagtcgccgatatcgtccacgaattacaagcgcaggttgaacccttaaaggaacaaagcagtattgctcaagattatttagatcaaaaagcgcagtttgaccaaattcatcaacaattattggtggttgaaattgatcaattggcaatcgatcaggcgagtcatcaaaagacggccgaatctttggctcaaacactagccactgttgaagccgataatcaacaaaccaacgctgatttggccgctaatcaagcgacgttaactgaattagaacaaacgttagaacaaaataaccagcaattacttgaaaaaagtcggttagcggaaaacttagtcggacaagagaacgtttcgaaagaacgggcgacgtttaccgatgaaagtcgcaaaacactgcagaaatcagttgaacgactaacggttcaattaacgacggctcagcaacaacaaaagcagttgcaagcggcttttgatcaacaaacacaaacggttgcgacccttaaaaccgaattaaaggctttacaaaagcagacggccggcagtgaagcggagttgaaagaacggattgaacaaattcgtcaggattatattgatcagatgcaagcacaaaccactaaccataataatcaacaatatttagcgaagaatttattacaagttaaaacccaattggcgcgtcaagatagcacgattagcgaagcgagtgcgcaattaacacaacagacaacccaacaggctaatcaagcggccaaggtccaagcgttaacggaacaggtggcccaattacaagcacaatcgacgcagatgcaacaacaattagcgcaagatcaacaggattatcaaaaagcgcaaaccaattggttccaagcatccggtattttgcaacaggcgaaagctaaaaaagcgagcttggccgagttggacgacgattatgccggcttctaccaaggggttaaagcggttcttaaacaaaaacaacaattacctggtttactgggggcggtcgccgaattaatgaccgttccgagtcaatatcaacaagcgattgaattggcgttaggggcacaactccaacaagtggtcacacgcgatgaagcaacggctaaacaagcgattgattatttgaaaaccaatcggattgggcgggcgacgttcttgcccaataatgtcgtgaaaccgcggacgctaccgaattcgttattgacccaattgcaacaacaacccggttttgtcggtattgcgagtgaattagtccaatacgatgcgcaagtcgcaccggtcatgacccatttgatgggcaatttaatcattgcgaccgaactcaatctagcgattaaactcggtcaattgacgggtcatcgctatcgaattgtgacgttagcgggagatattttgagccctgggggttcgatgactgggggccacgcgagccgtcaaggcagtggccttttagccaggaaacaaaccttggctgatttgaccgtccagattgataaaatgcaagtgtcattggatcaaaaacaacacggcgttcaacaattgaaacaaacgctaacggaccatcaagcgcaattgacgagtcaccaagcaacttttgaacaggtcaaagcgacgtctcaaacggaaaataatacgttaacgttattgaccgaaaaactaacccaagttaaacgacaacaacaagcgactgattaccaattacagcaacaacaaacggcttatcaagcggatcaacaacgccaaagtgagttgcgggtggccgaaaagacgattgctgcagcgattgatcagcttaaggctgaattggatcaagcaaatcaacaattgcaacattttgatgatagtcaaaaagtgatcgtccaacaacaaaccaaactagaaactaaattagccgttgccaacactgaatataaaaacggtcaagaaaaattagcaaccagcacgcagtccgttgaagaattaagccaacagttgacgactaatcaaacccgattggcggcgctccaaaaaacggattctgaggatgtgctcgatcaaaaagcgcgtcaagaactgttagaggcgacgaatcaaacgattaaacgattagaacaacaattaaaaggtcaaaaagaacaacgaacgactttaaaagcgactcaagaacgactacaagccgatgcgaatcgcgtttatcaattacagaaaaatgcgttagcggaacaagaagccaattcagtcgcgttaaaccaggccaagatgcacattgaccaacgcttaacaacattgagcgaagattatcaactcagttatgaagcggctaagtcggccttacaggcgtctgatttaaccaacgatcaattacggtcgaaattaaaactgattaaactagggttagccgatttggggactgttaatttagcggcgattgaggattatcaacgggttaaagaacggtatgatttcctcatgcaacaggaaaatgatttgctagatgccaaacgccaattgttggcgtcgatggccgagatggatacggaagttgagaaacgttttaaaacaacgtttgaacagacggccgttgcttttgaagccatcttcccaatgatgtttggcggtggtcacgcatcgctaacgttaactgatccgaccgcgcttttaaccagtggaattgatattatcgcacagccgcctggtaaaaaattacaacggttgagtttattatccggtggtgaacgtgcgctaaccgctattgcgttactgttctcaattttaaaagtgcgaccagtgccgttttgtatcctagatgaagttgaagcgtcattagacgatgctaatgttgaacgttttggccgcttcatgaaacgatatgaaagtgccacccagtttattgtgattacccatcgtaaagggacgatgacccaagcgaatcgcttgtacggcgttacgatggccgagtcaggcgtttctaagatcgtgtcggtttcactagaagaacatcaaacagcctaggaggcattcaatatgggattatttgaccgcattaaaaaggcttttacaggcgaagaagaacctgaaaagaaagtcacaccaccgattaccgaagaaccaacagaaccaacagaaccaacagaaccaacagaaccaacagaaccaacagaaccaacagaaccaacagaaccttctgaccaaccaagtgaatcagaaccagtcgccacgccaaccgaagtagcacagccgacaacaacggtgacgcctgatacggctgatagtgaaccggcagccgaaacggtggtcagcaaaaacgatgatgctgaaacgccaactgaaactgacgttgaaacaccagtagtatctgaaggaccaaaaggtgaaaccccagtagaatcagaagaagcaccagttactgaggccgaagtggtaaccgatgaagaggcccccgtggacgctgatcaaccaattcaggccgctgaaacacagaaatatgatcaaggattagcgaaatcacgtcaaacttttggacaacgtttgaacgcgttgtttgccaatttcagaacggtcgatgaagccttctttgacgatgtcgaagaaatgctgattgaagccgatgttggttacgaaacggcgatgaagattgccgatgaattgcgtgaagaagttaaattacggaatgttaagaagccagaggccgtttcaaaagcgattgttgagaaattagtcgatttatacggtcaagaaggccaagctgaagataatgcgttgcactttgcaccggctggcgaaacgacggtcttcttatttgtcggagtcaacggcgcgggtaaaacgacgtcaatcggcaagtttgctcatcaacttgaaaaagcgggtaaaaaagtcttgttagcggccggtgatacctttagagcgggcgctatcgaacaactacaagaatggggccgccgagtgtcggtaccggttgtcgctagtcaagctggcagtgatccagcctcggttgtgtttgatgcagtgcataaagccaagacggaacattacgatgtcttattagtcgataccgcgggtcgtttacaaaacaacgtcaacttgatgaacgaattggaaaaaattaaacggattatcacccgcgaaattccaaatgcaccccaagaagtgttactcgttttggacgcgacaacgggccaaaatgctttagtccaagcgaaacaattcaaagcgacaaccgatgtgacggggattgtcctgactaaattagatggttccgctaaaggtgggattgttctagcggtacggactgaattacatctaccggttaaaatggttggattaggggaacaaatgaatgatttacaactattcgatcccaaccgatttgtttatgggttatttaaagacatcattgtcggcagtgaaccgcaaacaacgattgataccgatgttagcaaagccatcaaatagattgatggcacaactagaagcacaattatccaaacgggtagttgtgttttttagcatgattagaaaggagcaagatgatggaaattgaacaacagttagcccaaaaaatcgtggcgcgcttgcaacgagagattccgtataacattaatgtgatgaataaacagggcgtgattatcgccagtggtgaaccaacgcgggttggccagttgcatgatggcgcggtcgaagcgattcgtctccggcaaaataatcgaattctaacggatcaacccaatggcattttacaggggtttaatatgccgattgtggttcaaaacgacgtgattggtgtcgttgggattaccggtgatccagagcagttggtttatatcgcacctttagtgaaagtcacaacggaattattgacggaacaagccttacgtgctaaagaagaagcccgtgaaaaaagacggttggaacggtttttattaacttgggtgggactcacaaccgaatctgaccaaaccgctgacttgattaatgaggcgcatgccttagggattaacctcaaccaacaatatcaactgattctcattaacacgacgattttaattcatcagccggtggatcctaatagttataaaattcgtttaaacccggatgaattggtgattattactcgccaaccagcggtgtgtcaaagttggttagcgctggcgcaaaagcaacagtatattgtcgggattagtacagcacagagcttattgggaattgccttagcacaagcgcgtcaagtcgttgattataaccgactaacccggtcgactgatccgaattatcgtttggaaattgcgcatatccagcggttgttagcggctaaagtagacgttagtgattaccggcaacgtctgattgaagttaaccaccaaccagcgggccatgagctaatcgcgacactcaaaatgtatattgaattgaacggcaatatgcaacagacggctaatcagttacacatccatcggaacactttgcactatcggctaagtcagattaaaaccaaaattgggttagaccctaaggtttatcacgaactagtgatgttatacattgctttaattgattatcaattaaactaactgtgcaatcgcacaattattatcggaaaatcgccagtgttatacagcagataaaacgattacaattattctgtaatataacacaggaggttttttagatgacaattgtttggtgggctgccctcattggtttagcagtcgcgattattttaattttgtgtcacttgaatgctgtttattcactacttttagggacaatcacgggggcgttgattggcggtgcgagtctagctcagaccgttgatattatcgtcacgggttctcaaagtgtgatggggaccgtcattcgcgttctggccgctggcgttttagctggggttatgatggaatcgggtgcggctgatacgattgcgcgcacgattgttgatcgcttaggggatcgtttagcgattttcgctttagcgttagcgacgatgattattaccggcgtcggtgtctttatcccagtggccgttttaatcgtcgcaccgattgcccttgaagttgggcaacggatgcacatctctaagctagcgttgttagtcgccttatcaggtggcggtaaggcgggtaatatcatttcgccgaatccgaatacgattgcggcggctaagggtttcaatgttgaactcagtcaattaatgattgccgacttcattcctgcagtttgcgggttaatcatgacgattatcttagcaacgttattgaaaaataagggtgcacaggttcaatccagtgatgttgaaggtcgtcaaagtgatcaaacacaagttggcccttctttaaaatcagcgattgtcacaccattattggccgttattttattattgattaatccaatcgggaatattttccatattgaattattacaaagttttcaagtcgatgcgatgtatatcttgccaatcgccggcattatcgggacgttggcgatgggtaaaggccatcaattgttagcttacacgaaagccggtatggcacggatgaccgacgtcgttctaatcttaatcggggctggtgcgattgctggtttgattggggtgtcgaatttgccggcagaagtcgttcgtttagtccaaagcagtggcatttcggggaccttcttagcaccgatttctgggattttaatggcggcagcgacagcttcaacctcgacaggggtcattttagcggctgggtcgtttagtaaaccaatcttagcgtttgggataccagcgttgagcgcagccgtgatggtccatacgggtgcgacagtcattgatcatctaccccacggtaattatttccacgtgacggccaatgcgatgaagatgacgtttaaagaacggatgcaagccgttgtctgggaaactggtgtcggtttaacgatggcggttgttgcggttctcatgtatggcatattgtgaggtggataggatgaaaattgtattagcgccagattcatttaaaaattcagtgacggcaatcgaagctagtcacgcaatgcgcaccggatttgcgagtatttttccagaagctgaaatcgttgaagtaccgatggctgatggtggcgaggggacggttcaatccttagtcgatgctaccgatggtcagtttaaaacggcaacggttaaaaatccactaggcgttgacgttgaagcgcaatatggcttgttgggcgatcaacaaacggccgtcatcgaaatggcggcggccagtggcattcaatttattgatgaaacgacgcaaaatccgttaatcacgaccacttacgggacgggccaattaatccgagcggcgattgaagccggggcacgtaaagtgattatcggaataggtggcagcgcgactaacgatggcggtgccggcatggcacaggccttgggtgttcagttattggacgctcagcgacaaccaattggatttggtggcggggcgttggcgaaattagccgcaattgatttgacagatgtgctccccgttttgaaagacgttgaactcgtgattgcttctgatgtgaccaatccattgacgggtccgacaggggcatcagccgtgtttggtccgcaaaaaggggcaacaccggcaatggtcgcgcaacttgatcaaaacctcagtcattacgcgcagattattcagcgcgacatcggtttagatgtcgcaacaatcgccggcgctggtgctgctggcggattgggtgctggcctgttggcctttacaaacgcacagatgcaagccggggttgagattgtggttgcacaaacccgtttagcccagattgctcaggacgccgatttagtggtgactggtgaaggcgggattgattttcaaacgcaatacggtaaaacgccgatgggagttgcgcgcgcggtgaaacgggttaatcccaatgccactgtgattgcgattgccggcaatattggtcaaggggcggaagtgctatacgacctaggcattgacgccatcttttgttcaacacctggcgttatgacgttggaacaagctttggcgcggacgaaagataatctgacgttaacgagtatcaacattgcccgcttaatcaaacaaagtcagtcgtaataaaccaattaaaatggtgagttagtcgcaactatcggactaattgaccatttttatttggccggaataatcgcaataaacgttgactcagaccaataaaatcggtactctaatagataggtcaatctaatctaggaggcgtcaaatggaactggcacaaaatgcacgaatgaattcactgtttgaattttatggtgccctgttaacggcgaaacagcacagttacatttcgctgtactatggggatgatttctcactaggtgaaattgctgaagagtatgcggtgagccgtcaggccgtctacgacaatattcgtcggactgaaaaaatattagaaggttatgaagcgaagttgcatttattccagaattacgaacaacaaaatgcgagtgctgatcagcttaaaaaatatattcaagcccattatccagaagaccaacaattagcgcggttattagcggatttgttggcgttaacagaacaataaaaataattaaaggaatgatgatcagtggcatttgaaggtttaacagaacgattacaaggggcattaagtaaattacgacgtaaagggaaagtgactgaggccgacgtcaatcaagccatgcgtgagattcgtctcgcattattggaagccgatgttaactttagagtcgttaaagattttattaaagtcgttaaggaacgcgcaattggggcagaagtcctcgatagcttgtcacccgcacaacaaatcgtcaaaatcgtcgatgaagaattaacgaagatgatgggtgaaaccgccgtaccgttgaacaaatcaccacacgtcccaaccattatcatgatggtcggtctccaaggggccgggaaaaccacgacggctgggaaactagccaactatttagtccaaaatgaaaaagcccgaccattgatgattgcggccgatatctaccggcccgcagccattgaccaattaaagacggtcgggtcacaaattaacgtccccgtttttgacatggggaccgatgtcagtccagttgaaatcgttcgtcaagggttagcacaggccaacttacaaaagaacgattacgtcttaattgatactgccggtcgactccaaattgatgaaaccttgatgcaagaattagcggatattagcgcattagcgcatccgaatgaaatcctgttgacggtcgatgcgatgaccggtcaagctgccgttgatgtggccgaagggtttaacgaccgtttagaggttaccggggttgttttaaccaagttagatggcgatacgcgtggtggggcggccctttcaattcgcgccgttacgggcaaaccgattaagttcaccggtcaaggtgaaaaactaacgcaattagatatcttctatcctgatcggatgagtagccgaatcctgggcatgggtgatatgttgagcttgattgaaaaagcccaacaggattacgacgaacaaaaagccgtcgatatggcggaaaagattaaagaaaatagttttgattttaacgatttcctcgatcaaatggatcaattgcaaaacatgggcccgttggaagacatcatgaagatgattccgggaatggctaataatccccaattgaagaacgttaagatggatccgaaagacatgacgcacatgaaggcgattgtccaatcaatgacgcctaaagaacgtgaagatccggatctattgaacccgagtcgccgtcgtcgtttagccgctggtgctggtcggccaatccaagaggtcaatcggatgattaaacagtttaatcaatctaaaaagatgatgaaccaaatgtcgaaaggtaattttaacggcatggaaggtttaatgggcaatggcgttcaagggcgcatgggtaagatggcgatgaactcaatggttcgcaagaataagaagaataagaagaaacgccttaaaaatgcgcgccggtttaaatcataatcaagttaaattaaaaaaaatcagcctgtaaagaaaaaacactttacacggcctgtaatttttggtatattatgtcttgttaaagaattaataggaggtggcattaatgtcagttaaaattcgtatgaaacgcatgggttctaagaaacgcccattctaccgtattgttgtagcagattcacgttcaccacgtgatggccgctttatccaagaagttggttactacaatccattaacagaaccaattgacttgaacttacaagaagaagtcatcatggactggttacaaaaaggcgcacaaccttctgatactgttcgtaatcttttatcaaaacaagggattatgcaaaaatatcacgaagcgcgtttcgctaagaaatagggactcgttatgacagatgtgaaagaactaattattgcaattgttcagccacttgtcgaacatccccaagacgtcaaattgactgaacatgaaactgaacgttttatggaatttgacttaaaggtgaatcctgctgatatcggtcgcgtcattggcaagcagggtcgggttgcgcaatcaatccgcaccattgtttatagtgtgaaagcaccatatgctaagcgcgtccgcttaaatattgtagatgcctaaaaaaacgtttagatgaaacagcaatgttttgtttaggcgttttttgttgaataaggagaaaattgcatgccagaaaaatattatcaagtcggtaaaatcgtcaatacacacggcattcggggtgaagtccgggtaatcgccaccaccgattttgcggaagaccgttttaaaaagggaacactactcaccgttgaaatgcctaacggtttaactgacgtgaccgtttcagcgatgcgtcaacacaaacaattctatctattgcaatttgaggggtatccgaacatcaatgatgtggaacccttcaaaggccataatttaaaaattgcggcgaatcaacgggataatgaattggacgatggtgaatattattacgatgatatcatcggcattgaagttgttgaagaagctgatgggactagttatgggaccgtcaacgaaattattaatcccgggcccaacgatgtctgggttattaaaaaacggggtcatcaggatttattattaccgttcttaaaaacagtcattaaacggattgatttagaatcgggtaaagcctatgttgaagtaccagaaggactgattgaatgaaaatagatgtcttaagtttatttccagacatggttcaaaatgggttatcccaatccattattggtaaagcaatcgaccgagaattggttaatttagaagtcacagacttccgtgatttttcagttaataaacaccattcagttgatgatgcgccctatggtggtggcgcggggatgttgttacgcccccaacccatttttgaagcgatggatcaagttaatgcgaagaatccgggccataaacgcgtgattcttttagatccagcgggggtcacctttaaccaaagcgtggctgaagaatttgcgcaagaagaccatctagtgttcatctgtggccattacgaaggttatgacgaacggattcggaccttggtcaccgatgaagtttccttaggtgatttcgtcttaacgggtggtgaattaggcgcgatggtcatgatcgatgcgattgcacggctaattcccggcgtgttgggtaaccaacaatccgcgattacggattcattttcaaccggcttattggaacatccacaatatacgcgaccaccggaataccgtgggttaacggtcccagaagtattgatgaacggtaatcataaattaatcaatgaatggcgtgaaaagatgtcgcttaaacgcacattggaacggcgccccgatttgttaaagaaactcgatttaaccaaggatcaaatcaaatggattcgtgaattaaaacaagaagcgacttcagaaaattagtcttttaattggtagctaattatggtaaaatttaatattgtgatgtgaagtcacaaaacaacggtattccgctggcgattcaacgttaatgaatatctgtgaaaaaggagagattctaatgaatctattaattcaagaacttacaaaatcacaactacgttcagacatgcctgaattccgtcctggtgacagtgttcgagttcacgttcgagttgtcgaaggtacgcgcgaacgtatccaattattcgaaggcgttgttatcaaacgtcacggtgttggcgtgagcgaaacttatactgttcgtaagatcagtagcggtgttggtgtggaaagaacattcccattacattcaccacgtgttgctaaacttgaagttatccgtcatggccgtgttcgtcgtgctaagttatactacttacgcgcattacatggtaaggcagctcgtattaaagaagctcgtcgttaagataaccaataaaaaggccgactcattacgaggcggcctttctttatgtgataattaaaagttaggtgataatgatgaatcaatggatctacgttgtattgtaccaagcgaacccactgtatgttgaaaaaagtaaaatgattcgtgcgttcagctccgaacaacgcgctcaagaatacgtctcattgctcaatgaaaccccttatgcgaatcaatcgttaaaagaggggcattatacgtatcgtaaattaaacctcaattaacctaataagtggtgtttgtaagcagcaatcttttgacgtgctttgtctggggcgggctgcttttttggtgtggtctgatggcaagtccccaggtaagccaagagcggttgggagagcatggctaaaatcgataatgtgaaaacggtaatcagcgcaaccagcgcgttcttagaaagcgtgagttgatcaaaataatgttcaaaacgctgattaaatgcggttaaatgggcctcgctttgatcagaaggggccttatgttgaacttttggttgttgatgcgcatcgaattgaatggcactggttggatggcttttggcaaaagtcatgcctttatcgaataagtaagggcttacaaaaggcaatgcaaaaagacaaatcaaactaaaaactgcaattattcgtttcataaaaataatccccttagttttataattaaactaattatagcataaataagccgttattaaaaataccgttctagcaactcgcaaaatgcgggtagttgctagaacggtcatcattagttgatatgaaattgataggatttgaaagaggcaatcaatccaatcagtaataaaatcaaggcgccaatgaagtaccctggcagtagaatgaagatgatgtaagcaataatcgctaccaggttggcaaagagtgcggtgttccggctcaaagaggtcaggtaggaaacgacgtgcaatacaatggcaatcagactaagccaccaaaccttgcccattgaatcactatagatggtcatgaagttcgtcaaatggggattaaccaccagaataataatggattgaatcacggtgacggctaagaatattaaatcatataaaaatggcaatttacgaattgaaattttcatcgcgatgaacctctaagtctcatagtttaagttattatcagtataacgaattttaacctaaaaagaaatatcgaatttaggagacttacttgtcgttggcaatccagtcatccaaaatcgccattttggtttggacgtaatcgatactagcgtttagttttgttggcgttcgtgtaatgtgattaattgtttggctaaatagtcgcgtcgttgttgaaaagtcccgtggtggctgcgtaattcaagatacttttgaatttcagcaattgaaaagccaccgcctttcaagcgacggattagggcaatccgttcttgatgctggttagaatagtagcgcaaattgcgtgtcccgcgtagcggcgttagtaggtgttggcgttcataatagcgcaatgtatctggtgataagccggttaatttagaaaattggccaattgaatattgattatcggttgacatggacttcactccattacttataatattaaagttgtgtaaaaacaggagggatcaagtttgtgagaaaagaaaaaatatttacccgtgatttttggttaattgcgagtgtcaatctattggtgatgacaacctattatagtttaatggtgaccaccgctaaatttacgacggaccaatttcacacaagtactagcattgccggattagtgattgggattaccgtgatcgggattttaatcgcgcggtttagttcaggttatttaacccaacattttacgactaaaaaattgttaatgaccgggacgattttattagtgcccgcgatgattttataccattttacaaccagtttagcgattttaatggcggttcgcttactccacggtttagcgattggtttaattagtactgtgaccaatacggcggtggtgttacttttcccagtcgaacgccgtggcgaagggattagttatttcagtttaagcaccgttttaggaacggcagttgggccctttttagggttaaaactgatgcagacggttgggttttcaacgttatttaatgttgaaattggttttgcaatcgcggccctcgtcattgccacactgattaatgccgaaaaaattcggtttaagaaggttcaacataacgaaccattaactttagcacattttattgaaatcaaggcgatgccaatcgcactattgatgttcgttgttggattaggttatgcggcgattcaggcttacctctcattttacgccggtcaattggatttggcgacctatgcaagctatttctttttagcctacgcatttgcggccttattatcacgacccttcaccggccgcttattggacgctgttggcgccaaagccgttgttgtcccaaccttattaattaacgcggttgggctagcaggggttgcttggacgcatagtggttgggggttattagtctcagcttttctaattgggttaggtttcggtaatttccaatcagttgcgcaatcaattgtggctaagaaagtccccgttaaacgtttaagtcaagcgaccgcgacgttctttattttctttgatttaagtttagggataggaccattcctattagggttgattgaacccgcagtcggttatagtaatttgtatttattgacagcaatcatggtactagcgtgtgccatcggttattggctagtcagtcatttttcaaagcaagcgacgaattaaattaatataagctgtgacagaactcggttatcaattgagtatcaagttggaaaatcgcctatcccgaactaaggatagacgattttttgatttgaacggaaattgatgagttctggcgcgcgtcaaaaaataatgttcgtttaatatcagaatatgacgacttctgtcacagcttgttttgtgtgtcgtgcgggaaatgcaattaaataagcacaatcaatgtcaatatggcgacattgattgcacttatttaagaaatctgatttagatagccgaaggagagtacaggaattgaacctgcgcgccggtataagccggttcgacggatttcgagtccgttgcattaccactctgccaactctccacaatggtattattatagcagattttatggattctgaaaagtaaatcacaaaaaagattgagctttggtaacggattcggtatcattgagaatgaatatcaattagaattgatgaagaggggcttttcaatgacaaaaaatggggtattactcattaatttaggcacaccggcggaaccgacaaccaaagctgtgcgcagctatttgaaattatttttaggtgatccacgtgtgattcaaataccacgactattctggtggccgattttaaatttgatgattttacccgcacggcctaagaaatcggcaaaactgtaccaatcgatttggaccgagaatgggtcaccgttgttatattatacgcaacaacaaaccacggcgttgcaagctcattttccggataaaatggtccgttttgcgatgagttatagcaatccgcgcattgggacggttttaactgaatttgaggccgctggggtgacggatttaaccgtgattccactttatccgcaatattcaacgacgacggttggagcagtctacgatgaggttgcgcgtttttatgtgggccatccacaaatgccgacgttgcattttattcaagatttcagcgacaatccacaatatgtgcaagcgatggcggccaaaatccaaacacaattagccgatgctgattacgatcagattctattatcctatcacgggattcctaagagttacgcgactaagggcgatccctatccacaacgttgtgagaattgcacggccttgattgccgcccagttaaaaacagaagtcccagttaccatgacctatcaatcgaagtttggaccgaatgaatggttaacgccggcgaccgatgcgacgttaaaggccttaccagggcaaggtgtgcacaagatacttgtggtgacgcctagttttgtggcggactgcctggaaacggttgaagagatcgaggatgaaaatcgcggttatttcatgggaaatggcggtcaacaatttgatgtggtgcaaccctttaatgcagacccagaatttacgacagtccttgcgagcctagtgagatagcttgttaacgaacgatattagtttccgtttatcctataattaggtacttaatttttaggggacagtgtgttattctattctcaaggagatgagcgaatggcacagaaacatttttatggtaaatatgaaattacagaagaacaaagtgctgatcaatatttggcgaccgttaagttgcgtaacgcggttactcagattgtgattgaggatgatgttttagcggagttgacggcccaatcaattttgccgcaaactgtcattcataatattatcaaagatcccacacaactcagaaaaccaatgacgatttcgaaacataatatcgatcaatatttagactaaaaaacgttagaatcaactgattctaacgttttttagtgggtactgatatcgcaaaaagtagctgagaccgctttttgtaaatcttgcggattgatttgaatcgaacgaccaattttacccgatgaaacgaagattaaaggctcttcagcggcttgctgatcgatataaatcgggaaatgggccttctcccaaatgccgatgggggtattggcaccatgttcataaccggttgtcgccactaagtctttaaggggcagcatggcaatttttttattacctgaaatttggctgagttttttttcgtctaaatgaccatcaatcggcacaacaccaacaatcggaccggtttgtttgccagttaagaccagtgttttgtaaatcaaatgttcatcaatcccgagatgctcaacttgcatttgagcgacatggtgttcttcatgggttggaaaagcaaattgtgtgtaactaattttttgcttatcaagaattttttcaacgagggttttaggtagttgatccttctttttcttactcaaaatgacgacactccttactatacaatatgcttagtttacggcatctgcttaaaattgcaaatattaaaggggttagctgacgccaattaatggatttcgttgtataatcattgtaagcaaggagaggatttagatgagttggtttaaacatagttatgaagatgatattaaggttgagtcgcacgatttcaaccaactacttaatcgagccagagccgataatggtcattatcagaaagttcaggcgacttttgctgatttaacgaaatcgtatcaggtggcacaatctgaattaaacaccaaggaaaataagtgagttaaataagggtagtacagggattctagcgctcaattgatttgagctagccggggtattttttatatttaagaagcataaaattcgcttgaatacaattaaattgttaaattgatataaagttatttattgacggctgttaaaatattctatattcttattataacgattagcaaaaccaaaggaggaaccaccatgccaattcaagcaaccactgtcccgacaaccgaatacgtgattaaactaaaccgattactcgagaaatttgtcgtttttgagactgtctttgatgaatatgcgcagacgtgtcgtaacattagtttgggtaaatgtttggtgaatgaaaatttggaaacgcttaaactgtattttgaacaaaatctaacggtgttgcgtcaatttgtagcccaggcggggagcgttgaaccgccaatcgtctttgaacaaattaatcaagaactgcaaagtgcgttggccgattacgtggttgcgacggaaacgatggttgattcacttgagggtgatgaactgaccgtttatcaacggattattctgggtcggtctgagcagactgttcaacggcaacgaattaatcaagtattacaagcaatttcgaaagttggcttttagacctgacgaattcaaccggttatggcataataagagtaatcaataacgataactaacttggatgggtgacataatggaacgacaaacctggcattttctcttctataaatcagcgtttacaaaagttcagattgaccggctattaggttatttacgacaacaacgtaattttggcggttttccaattgtcgaacttgctcaagatgggaatagtagtgacattcgctttgtcacgatgacctttgatccattagctcaaattgagacatcgttgcaatcagagatggcgaagtttatcctgatgcatgcgattcgaccagacgataattcggctgaagcggatatgcggttatatgggcgtgtcatgagtcattcattagaagcactgggaatcgaatttcaacgttacgatcagcaaacgatggacgtcatttattggggtcaaggtgcgacccaagcttaggcttaaaaccaagttggcttagactaacttggtttttttatttgttatgtctttagattcgggccataatcaggtatgatattatcagaccagctatttacagaaaagatagaataataataaggaaatggtgattaatgatggcagaccaaaatatgcttgaattctttgaaaccgaattagatgatttacaatttagcggcgatgttaacttgaactgggataaacaatcgcgcgcaattgaacttgaatttacgttaaatgttgcgaagagccaagacctagcagtcgaagaccaagatggcgaattaaatgaatcagatgaaatcagttatgaagatgctattttattttttgatgaaagtaagttagacgggtttgaatacgctgataactatttggccgttattcctttctcaggtcgccaagggttaaatgcacaagttgcccgtggccttttcaattatctacaagatttattagatgatggcgaagaccaattggccgcgtttgccaatgatgaatctgaagaagaaacgtttattctaaattgggatgatacggtcttccaagcaactgttgcacaagcagacgctcaattagctaaaaaatattacgcttatcctaagtattaaggagcctttaaaatggaatggacaaaagtaaccgtcacaaccctcaatgaatccgttgaagcaatcgctaatattctaactgatgcgggggctgaagggattcagattgaagatgagactgatgttcaaattagtgcctttttccctgaatctatttttgtccccgaacggttaccaatcattaaacaccgaattggtcaattggctgaatttggattagatgccggcgccggcaccgtggcgttacaacaagtcgcggatgatgattgggcaacggcttggaagaaatattatcgaccaacccgtttaacgcgctttttaacggtcgttcctagttggaccgactatcaaccagaagatccgcgtgaagcgttaatcaagatggatccggggatggcgtttgggactggaacgcatccgacgacgcatctttcggtacaaatgttagaaatgattttacgcggcggtgaacagctgattgatgtcgggacgggttccggtgtcttgagtattgcagcggcccatcttggggtcagtgatattcgtgcgtacgatgtcgatcaagtcgccgtcgattcggctaaagagaactttgctttaaacccagtgactaaggggattgacgcccaaccgaatgatttgttaaacgggattacggtccctgcagatgtgattgtggccaatatgttaacggaagttttagtgccgatgattccacaagctaaaccacttttgaaaccgaacgggcatttattgttagccggtattattaacgataaagaagcggtcattcgtcaaacgttagcggctaatgaactgatagttcaagaaaccttatatatgggtgactgggtcgggattatcgcacgtttgaaaactgatgaagattaagaggaattgagatgcaacgttattttttagagcaacctttagccctcgaacaagccgttgaattaacgggggaaaccgcccaccatatgttgaaggtgatgcggatgcaagtgggcacccaagttgagttggtgtcggatgatgaacaagccttcgtggccgaaatcatggtcgctgatgtcaccaataaaatggtgcaactgacggttcaaaccgcgttaaccacgacggtcgaattaccagtggccaccacgattgtttgtgggttgtccaaaggggataaaaccgattggatcgttcaaaagggtactcaactcggggcgcaccggtttattttttgtaacagtcaattttcaattgcgaaatgggatgctaaaaagcaaactaagaagttacaacgattgcaaaagattgcgcaagaagcggccgaacaagcccatcgaacgcatgtcccaacgattgaatggcgcgcaagtttaacctcgattgcaactgaagcggcgaccgtcaaactagtggcgtatgaagaatcggcgaaagccggtgaaactgcacaactagtgaagaatttacaaacattgacggctgggcaaagcttgttgtgtgtctttgggccagaaggcggcatagcgccggctgaagtagcacaattacaggcggccaattttcaattagtcggactaggccctcggattttacgggcggaaaccgcgccattatatttattaagtgcgctgtcatatgtgacagagttagccactttatagtatgatagggaataacaatttgatagagggcttatagagatgaataaaataaaacaaaatcgttttttacaacaagcttgggtacggtatttcctagtcgccttagtattagcggtcctattgccacttatttttggttggcttggcatcagtaaaacttggcgggtgggactactcttcatgttaattaatggttgcgcggcgtttatgattggttatcgcattcagaaaacccgtgcgccttggtatcatattttatatttaccagttttatttgccttaatggtggttgttcgctatgcagattataattactggtttgttcctatttatttcttgttaagttacttagggattaacaccgcgtatgaacgtcgcaaatagaactgactcgacaaaattgttgagtcagttttgttgtttaaaaagcaattttaattgagtatgagagagtgagtggagcaagatgtcagaagaaaaggtgatttcgcaacaagaggttttacaattatgccagaaatacatgaacgctgagcatcttgctttcgtccaaaaggcttacgattttgcggcctatgtccataaagaacagattcgccaatccggtgaaccgtatattattcatccgattcaagtcgctgggattttagccgaattgaagatggatcctgaaacagtggcttctggttatttgcacgacgtggttgaagataccaatattaccttaggcgacgttgaagagatgtttggtcatgatgtggcgattatcgttgatggcgttaccaaattagggaagattaaatataaatcgcatcaggaacaattagccgaaaatcaccggaaaatgttgttggcgatggctaaagatttacgggtgatcatggtgaaactcgccgatcgtctccataatatgcggactctcaaacatttaaaacccgaaaaacaacgacggattgcgaatgaaacgcttgaaatctacgcaccacttgccgatcgtttagggattagcaagattaaatgggaattagaagatatttcattgcggtatttaaacccacaacaatattatcggattgtccatttaatgaattcgaaacggacgcaacgggaactctatattcaaggcgcgattgaagagattaaagattcagtcgctgatttagagatgaattacgaaatctatggtcggcccaaacatctctattcaatttatcgcaagatgcgcgatcagcataaacgctttgaagaactctatgatttattagcgattcggatcgtggtcgattcgattaaggattgttacgctgttttaggggcgattcataccaaatggaaaccaatgccgggccgttttaaagactacatcgcgatgccgaaagctaatatgtatcaatcgattcatacgaccgtgattgggcccaaagggaagccattagaggtccagattcggacgcaagagatgcacgatgttgctgaatacggggtggccgcgcattgggcctataaagaaggcgtcaaagaacagattaagatcgatgaatcgggtcgcaaactcgatttattccgtgaaattctggaaattcaggatgcttctgaagacgcggctgaatttatggaaagtgtcaaaggtgatatttttagtgatcgagtttacgtctttacgcctaaaggggatgtttacgaattgcccaagggctcggtcccgcttgattttgcttatttagtccataccgaagtcggtaatcatgcggtcggggcgaaaattaatggcaagattgtgccgttaaattatcaattacggaatggcgatattgttgaaatgttgacgtcaactagcgcgacaccaagtcgtgattggattaaactagctttcacagcacgggctcggaataagattaaacgttacttcaaaaaagaagatcgggatgagaacgttgaaaaagggcgtagtgccttggaacatcttttatctgatcaaggttatctaccgaaagattacctcaataaaacggcggttggcgtgattctaccccatttcaattttaatgccgatgaagaattgtacgcggcaattggatttggcgaaatttcgcctcaatcagtggttaatcgcttaacggtcaaagaacgacgtgaaaaagaagaaaacgaccaaaaggtactagaagccaaaattttatcagccaaggattcacaacagccaggccctaaagcgagtgggaatcacatcaccattaaacatgaagatggtgtgattatcgacggggtcgacaatgtattggtgcgcttaagtaaatgttgtaatcccgttcctggtgacgatatcgtggggtatgtgactaagggacggggcgtttcagtccatcggcgggattgtccgaatatcattgaccgtgcggacatgaatagccgattaacggaagttagctgggaaaatacgtctgataaatcgcaacaattgtacgatgcgaatctggaagtttatggctacaatcgtggcggtttgctaaacgacgtgttgcaagcgttaaatgcgcattctaaacagttgaacaatatcatgggtcggattgaccatgatcagatggctgatattcacgtgaccgttgggattcgtaatattgaacatttagaaacgattatggaagccgttaaaaatattcctgatatttatgaagttaaacgggtacaaggataaaagggggattcgctaatgcgagtggtattacaacgagtgagtcacgcgagtgtgaccattgaacagaccgttgtcggtcagattgataaaggctttttattattagtcgggatttgcgacgaagatacggatgccgatttagattatttggtcaaaaaaattagtctgttacgggtttttgaagacgaagccggcaagatgaatttggcgttgaaccaagttgacggatcaattctatcggtttcacaatttacgttatatgcgtcgactaagaagggcaaccggccaagctttacagcggctggtgcacctgattacgctgaaaagatgtacaatcgctttaatcagaagttagcggcgactggtttaaccgttgcgactggtgaatttggggcggatatgcaagtcggactcgaaaacgatggtccggtgacgattttatttgatacgcaggaatcgcgatgagttatcggaatgcaatctgggatttcgatggcacgctttatgatacttatccagtgatgttagaagcattactgacggtttacgcacgccatcaagtgcccgttcaagcagaagcgctctaccgattaattaaacaacaatcaataaaagtggcgttgcggcaattagcgcaaacgactggcgttgggtttgaaacgttagaccgacaataccatgaacttgagcagcaaacgcaactaacaccgcaaccttacgtgggggcggcggcgattcttgctaaggttagtcagcggggccagaatttcttgttaacgcatcgcgatcaggctgcgcaaacttatctggcgcaacaaggattgagtcagtattttacggagattgtcacgagtcaacaggcctttgcccgtaaaccagcgccggatagtttattgtatttatgtcaaaaatacgatttaaaaccgacggaaacggtgatgattggtgatcgtgcgttggatgttgaagctggcatcaacgcgggggtgcaatccgtttattttgatgttgatcatttaccaatcgcggtgcaaccaaccgtgacgatccatcagttatctgaattattaccactatttgaatagcacaacagtcaattaaaaagcgtcatcggcctgaatttaggctgatgacgcttttttagattaatgtaataatcaagaacgttaaataccaagcggccgacatgattaagacgaaacgccaccaacttcgtaaaaatttcttaagaaataattcgtgatcgtaataaaaacgggttaaggcccaaataatgccccagagacacatcgcgagaaggataaaccaaccagccttgttgaagtagggatgactgagcataatggtgctcagaatcaggggagtgggtaagacccaactgactaacgcgagtttacgatggaaatagcggtgaatcaagcgttggcttgcataggctacgccgccacacagtaatggtaaaagaatccagaagagttgcatcatttagtcacctcaaaagttaatagttctattgtaacgtcttttttatgagataaaaagtctgagttgcacttttagcgtattcggtgtaaactgctgataagaaatgactaggtggtggaatagttgaagaaaaagacaagtacgtttagtcgggttaccaaagtgttcgtttgggtcatgttaattgccacagtgggttcagtcgtttttggcgcgttagcaggtactggcattttaaacttttaaaaaatgataataataatgaccaataatggtcaataaaggtgatctctgcggagagcgcctttttttatttggctttttggacttgttcattaaaatcaaaaaaacgctaaaaatagcgaacagctttttttaggcaaaatgtggtagaaagtgggggattgtggtagactaaaattagttgaggtgggcaaaggggtgaagtatatgttcatgggcgaatttcggcatacaattgatgcgaaaggacggctaatcatgccggccaaatttcgtgaggatttaggcacagaattcgtattaacccgtggcatggataactgcatcttcggctacccactcgatgaatggcaacaattagaagaaaaattaaaaaaattaccactcgctaaaaaagatgcgcgggcctttgtccgtttcttttattcagcagcggtggaatgtgttcccgataaacaaggccggattaatattccgcaaacattggtaacccatgccggtttagagaaagattgtgttctaatcggtgtttctaaccggattgaaatttggagccaagcaaaatgggatagttttagtgaagaagcagaagaaaactttgacgaaattgcagaaaatatgttggatttcgacttttaaaaggatggtaatcagatgtcagaaacatttaaacatcaaagtgttttattaaaagaaacggttgatgccttgaatgttcaacctgatgggatttacgtggatgcaacacttggtggcggcgggcatagtgaatatctattgtcacaattaaccacgggtcatctttattcattcgaccaagacgatcacgctttggccagtagcaaggaacgtctcgctaaatatgctgaagcgggtcaagtcacatttgtgaagagtaatttccgttatttaaaacaagcacttgcagagcatggtgtgactaagattgatggtattttatacgatttaggggtctcatcaccacagtttgatgacgcacaacggggattcagttataaaaaagaagccccactcgatatgcgaatggaccaaggggccgaattaacggcctacacgatcgtcaatgaatggacctatcaacaattgattaaaattttcttccggtatggtgaagaaaaattctccaaacaagtggcacgtaaaatcgaacaacgacgtgaaattgcgccaatcgaaacaacgattgaattagcggacttaattaaagacgcgattcccgcaccagctcgccgaacgggtggtcatccagccaaacggattttccaagcgattcgaattgcggtcaatgatgaattaggcgcgattgaggagtcaatcgaacaggcgattccgcttgtgaacatcggtggccgaatcagtgttattacgttccaatcgctagaagatcgtttagtgaagaccatgtttaaagaacaagccactcctaaagaaattccgcgtggtttaccggtcttgccagagacgcaagtgacagttttgaagttagtgaaccgtaaaccgattttaccaacggatgaagaattagaagataatcaccgctcgcacagtgctaaattgcgggttgcagaaaagcaaaaagaatttgacgactaaaaaaaggactgatataaatggcatctaacacggcgcgccaacttgtagctcctgaattaataccaaaccaacaaccgacaatacatacagctcctaatgaacaacctaatcggaaagtcgcattatcggcgatggagaagacgacgttagccattatcggtatcgctttttttggaatgttggtgggcttattgacgactaaaattgcggtggttaatgcgcaacgtgatttacaaaccacatcacggtcaatgacccaagtgcatgctagaaatagtgatttaaaacaagaaattggtgaattgacgagttcagattgcttagatgcctttgcccaaaaaaatggtctgacgttaaatgaaaataatattcgaaatgtgtctaaatgaagttagttaaaaagacacgtaagagtccacaatggaatcgacgcgtatttggcaggcttttagtgctaattattgcggcgatttttgtggtttttgccggacgcttcatctatatcgctgcaaccgggcagattgcaggggttgatttgaccaagcgttctcacaaaaaatatgaagaagacacggttgtgcgggcgcaacgtggcacaatctatgactcactgggcaacgtcttagcgcaagatacgaacgcttattcagtgtatgcggtcttgagccacgattatgtggggactaataaaaagccgctttatgtcacaaataagaaaaaagtggccaaaatattaagtcagtatttaccattaagtgaagctaagatttataaacaaatgacgccaaccaaccaagcagtctaccaagttgaatttgggagtgcgggtcaaaatttatcgttgagcatcaaacggaaaatcgaagcccaaaaattaactgggatttattttaaagaatcacccacgcggctctatcctaatgggacattcgcgtcacacgtcattggtcttgctcaaacatcgaaaagtgccaccgctgacggtagtcaagatttagtcggggtgatggggattgaaaaatacttcaatcaacagttaaccggtgaagatggttataagaatttaatgcaagattcatacggctacgcgctcagtcagaaacaaaacaaggtgaaagccgctaaaaatggtcaagatgtttatttgaccatcgattcacgactccaatcttatctcgaaagtctattaacgacggtcaataagaaatacaaaccggttagcatgaacgctgttttgatgaatgctaagacgggtgaaattctagcagcctcacaacggccaacgtttaatgccagcaccaaaaagggtattggcgatatctggcgcgatacattggtcgaagatgggtatgaacctgggtcggtcttaaaaattgcgaccctgtcagctgccatcgattctggaaactataatcccaatgaatattataaatccggttcggtgcaagtcggtgataaaaaaattagtgattggcaaacgagtggttgggggacgattccgctcagccaagccttcgcccgttccagtaacgttgggatggttaagttagaacaggaaatgggctccgatgtttggaagtcatacctgaccaagtttggctttatgaaaaaaaccggtattgagttacctggtgaagtttccggatccctacaatatacgcggccgttggatcaagcaacgacttcgtttggtcaagggattaacgtcaatgtgatgcaaatgttgcaaatgacgagtgcgattgctaataatggcacgatgattcaaccacaaattttggcgggcgttggtaaacgtaaaacgattgaaccgattaaagtcggccaaccgattaaggccagcacggctaaagaagtccttcaaaatatggaagatgttgtttatcaggattatgggacgggacaggtttatcagattccgaattacaaagtcgcggttaaaaccgggacggcccagattacggcgcccaccggggggtatttaactggtgctaacaattacatcttctctgtaggtggtattgcgcctgctgatgatccaaaatatattttatatatcacgatgaaacaaccgcaacaaatgacggatagtgccgaaacgattctgtcacaaatttttaatccgatgatgcaacgggcattggaatacactaaaaaagcggagaaggataaacagcaacaagttaaattaccttccgttctaacaaaggcgactaagacggcacaaagtgagttgaccgaggccggtttaaaaacggcgttagtcggtagtggtaatttagtcgtgcaacaagtgccaagtgccggcagtattattttaccgaaccaacgggtcttgttaatgaccaatggcgcgatgacgatgccggatgtgacgggctggtccaaaaatgatttattgaagttatctcaattaacgggaattcaagttgagataaagggtagtggttacgcctatcaacaaagtttggcgactaacgggttgctagatggcgttaaaaaagttaaagtacaattaaaataagtgagtgtcgattaaaggagtttatcaaatggcaacaggacaatttttagtacccttgatgagtagtttcgtgattacggtgatctttatgccgttattcattggttatttacggatgaaaaaagagggccaaacgattcgcgaagaaggccctaagtggcacgctaagaaaaacggcacgccaacgatgggtggtttattattcatcattgccgctgttatttcgagtctctgggtgggcctttatttagatcaactaacgaacagtctatggattgtcttatttatcctagtgttatatgggttactcggttttgcagatgattttattaaagtctttaaaaagcaaaatatggggttgaaagcttggcaaaaactagccggtcaaattatcggtggcttagtttttgtttgggtttaccaacatgaaggctttagtcacgcgttaaaaatgccattgattggttcgatttcgagtctttggttatttgtgccctttgttttattttggttagtcggcttttcaaacgcggttaacttaaccgatgggattgacggattggtggctggtttagcaacggtttcgtttgccacttatacgtggattgcgttccaacaaaatcaaattgatgtggcgatttttggcctcagcatggttggtggattagtcgggttcttactctttaatcgcaaaccagcgcaaattttcatgggcgatgtcgggtcattagcactcggtggtgcactagccgcgatgtcgattctattgcatcgtgaattctcattgttattaattgggttagtctacgtgattgaaacggccagcgtcatgttacaggtcgcgtcattcaagttattccataaacgaatctttaaaatgagtccgattcatcaccatttcgaaatgtcagggtggagtgaatggcggattgatatcagtttctggcttttcagcattatttgttcagctatttatttgttaattttctagaagagggcgtaattgatgagaacagtcgcaacgtatcaagatcaagcagtattagtgttagggttaggcaaaagtgggattaacgccgcgcaactattattaaaattaggggcaacggtcgtggtcaatgacggacaagaccaagaaacgtcagaagcagttgccgaattacgggctttaggcgccatcgttattacggggagtcatccggttagcctgtttgacgaacatgcttttagttatctctttaagaatcctgggattcgctacgataatccgatggttgaagcagcagtggctcgccatattccagttttaacggaacccgaattagcctatgaagtgtcagaagcacaatgggttagtgtgacggggtcaaacggtaagacgacgaccaccacgctgattcaattgatgctcgattataagcgtgcgcaaggtcacgcctatgccgccggtaatatcgggattccattgagtcaagtcgcgcaaaaagtaactgatcaagatgtcatggtcacggaattatcgagtttccaattaatgggaacgaccacggttaaacctaaaattgctgttctaacgaatatttatgaagctcatttggattttcatgggtctcgagcgaattacgtgcaagcgaagatgcggattgttcaaaatcaaacggctgatgattatttcgttgtcaactgggatctgccagaattacgcgaattaagtcagcaaacgaaagcccaagtcgtgcctttttcacgtttaggggctagtcaggcgggggcttatgtcgaagccggtcaattgtgctttaaaggcgaagcgattatgccggtcgaagagatcaatatccccggcgatcacaatgttgaaaacgccttggctgctttggcggtggctaaattaatgggtcaatcgaatgaagcgattattgaagtcctaacgactttcaccggcgttaaacaccggatgcaatttgtgacggaataccaacaacggcgtttctataacgattcgaaagccactaacatggaagctaccgaagtcgctttgaagagcttccaacaacccatcgtcttaattgccggtggattggatcgcgggtttacgtttgaaccgttattgccattgttgaaagcgcacgttaaagccgttattttatatggtgagactaaacaattattagcgcaaaccgcgaaagaagcggggattcaagttatcgaaatcgtggaccatttaacggaagccgtaccagcagcgtacgccgctagtgccgctggcgatgttgttttattgtcaccggcttgtgctagttgggatcaatttaaaacatttgaagaacgcggtgatgtttatctagacgccgtcgacaaaatcatagcagagtaaattggagattttataatgagagtaatgatatctggtggtggcacgggtggccacatttacccagcattagcgttaatccaaagactgaaggaacgtggcttattagacgacgttttatacgtcgggacccagcgcggtcttgaaagtcgaatcgtccctgaacagggaatcgcatttaaaacgttggagattcaaggttttaaacggtcgatgaatgttgatgggtttaaaacaaattttaaaacgatccaattatttatgcacagtattaaagaagcaaaacaaatgattcgcgaattcaaaccagacgtggtcattggtaccggtggttacgtgtcaggctcattattatacgccgctagtcgcctaaaagtgccaacgattgtgcacgaacaaaattcagcagccggtgtcacgaataaatttttagcccgctttgttgataaagtggcgatttcatttgaatccgtcagtgatcaatttcccatgcacaaagtggtcttaacgggtaatccgcgggcgcaacaagtggcggggatggtgcctaatcaacgcctgagcgaattcggattaaaaacggatagcccgaccgtcttaatatttggtggtagtcgtggggcgcctagtattaacaaagctttcatcgacgctgtgggacaattaaatcaacggccctatcaggtcttgtttgtctcagggcaagtgcattatgaacatgtacaagccgaattagccggtaagcaagtcaattctaacttggcaatcgtgccttatatcagcaatatgcccgagattctacctgatttaaaagcgattgtcggccgtgctggcgcaaccagtttagccgaaattacggctttagggattccctcaatcttgattccaagcccgtatgtgacgaacgaccatcagactaagaatgcgcaaagtttggtcgaacaagacgcagcgattatgattccagaagcccaattaacgggtgatcgtttagtggttgcgttagatcaaatgttagaaaatccagatgaccaacatgcgatggcccaagcggctaagaaaattgggattccggatgccgctgatcgaattatcgaagtgattgaaaccatcatttaatgaaagtaaggagcgtgtgacttgaaaaaagaacaaaaatccggggcacatgacccgttacaattattaaatatttggcgttcctatcaactaaagcgttggaaaaaggaacgccgtaaacggttgaaaccgggacgacctacgatcagcaatcaattgccacagtttaaggaacaacgctcggctaagactaaatggcgtttagccgttttgttagtcgtgttcacggtcgggacggttatctcactttacttcatgtcacctagtagtgatattcaacagttagccgtcagtgggacgaagtcggtaccagatcagcaagtgattaatgcgagtcaaattagcttgggtgataacgtactatggcaattgatgcaccaaaaagagaccaaacaacggattcaaacgaaactacctaagattaaacaggttaatatcaaagtagtccaatataatcaaatcaatttatcggtttctgaatatcagacggttggttacctagttcgtgaaaaacaatactatccgattttagagaatggtcagatcttaaaaacgaagatgacacagtccttaggaagtagcccagtttatagtgggtttaagaatgataagtatcttaaacaaggcttaaaactctatcgtgagtttccgaagagtattcaaagtgctgtttctgaaattcggttgacggctggcaataataatccctatcaaatccacctgtacatgaatgatggtaacgaagtgattggggatttacggacgttagcgactaaaataaagtactatccagtccttgtgaagcagatgaagggcaaggggcaacttgatttagaagtaggcgcttactctaaatcatttgaaacttcaaaataggtaaatttaaatagtagttaatagcattaaaataacggtattcactttctaaatggagtggatatgtggtactatttatcataggagtcattttattctaattgaatgtcaggaggttccacatatttaatggagaattcaaaaatttatgtcggtcttgatgttggaacgacttcaattaaagtaattgttgctgagtcaatgaataagcagttaaacgtcattggcgttggatcagctcgatctaacggcttaagccgaggcacaattgttgatattgatcaggcggttaccgcaatccaacaagccgttcaacaagcagagcaaaaagcaaatattgaaattaaacgagttgttgctgggattccagccaacttattacaaattgaagaatgccaaggaatgattgctgttgcggatcaatccaaggaaattacgagtcaagatgttcaaaatgtggcgagtgccgctttagtccgcaatttaccaccggaacgcgaaattttaacggtattaccaactgaatttacggttgatggtttcgatgaaattaaggatccacgcgggatgatgggtgtccgtctcgaaatgtccggtgttttattcactgcgcctaagacgatgattcacaatctcaaaaagtgtattgaaaaagcgggcttagaattgtcacagctagtggttaatccccttgcgcttggcaaactagccttatcagatggcgaacaagactttggttcaatcattattgatttgggtggtggtcaaagtaccgctgcagtcattcatgaccatcaattgaaattctcagtgattgatcaagaaggcggcgaccacattaccaaagatatttcggtcgttttaaacacctcgattgaaaatgctgaaaaagccaaacgtgattatggcaatgccgattcattagcggcttctgaagaagaagaaattccaatcgaagtcgttggtcaatccgtaccagtgcaagtcactgaaaagaaactggctgagattatcgaagcccgtttaatgcaagtctttgatcgtttaaagacaagcctagataaagttgacgcgttcgacttaccaggtggggtcatcatgaccggcggggtgaccgcactacctgggattgtcgatctcgccaaagaaatcttcgattgtccggttaaattatacattccagatcaaatggggttaagacatccttcattcgcacagggattgggtttgattaactacatagctaacttatcagaagttgattggttggttcaaagtgcgctgggtaatgtggaacaaccaacgactgaaacgcaacattcaacgcaaatggggaagacccaaacggcagttgaagaagtacccgttaaaaaaacaaaaaaacaatcaaaaaatggattcgaaagcctcaaaaatttctttagtaacttttttgaataggcgagtcgtaataggaggaaacagcacatggaaaattcattagacgaatcacaagcaaataacggtgcagtcattaaagtgattggtgtcggtggtgccggtggtaacgcggttaaccggatgattaacgaaggtgttaaaggtgtcgaatttattgcggccaacacggatgtgcaagctttggcagattcacaagcgcaaactaagattcaattaggacctaaattgactcgtggtttaggtgctggtgcgactgctgatatcggtcaaaaagcagctgaagaaagtgaagaagttattgctgaatcccttaagggtgctgacatgattttcgtcacagccggcatgggcggtggtaccgggactggtgctgccccagtagtcgctaaagtggctaaagacatgggtgctttaacggttggggttgtcacacgaccttttacctttgaaggccctaaacgaggcaagaacgcagcttcagggattgccgaattaaagcaacatgttgatacaatggtgattattgccaacaaccgtttattagaaattgtcgacaagaagacaccgatgatggaagccttcaaagaagctgataacgtgttacgtcaaggggtccaagggatttctgatttaatcacatcacctggtttcgtcaatcttgattttgcggatgttaaaaccgtgatggccaaccaaggttctgctttgatggggattggttcagcaactggtgaaaaccggacaactgaagcgactaagaaagctatctcatcaccattgttagaaatttcaattgatggtgctgaacaagtgctcttgaacatcaccggtgggcttgatttatcactttacgaagcacaagaagcggctgaaattgtccaatccgctgccacaagcgaagttaacttaatctttgggacatccattaacgaagatttaggcgatgaagttgttgtaaccgtcattgcaacggggattaatgatggccctagccatgcacgtcggacaacatcgaacacaacttcagcacccactaaaaaagttgaaaacaatgacgatccttttggtaactgggatgttcgtcgcgaacctagtgtgcgcgaacaagcccaaacgactgaaaattttgacgacgttgaaaaaaaggaattcgatatctttaaacggacagaacaagttgatggtgacagttctgaaacgaaaccagatacgcaaactaacgatgatgtgccaccttttttcaaacgtcggcgcaaatagttaatcaatgaggaggcctgactaatggctggtaaatttagttttagtaatttctttggaatgaatgatgaagacgactatttagctgaaaatcaagccaatgaatcagttgaagaacaagcagctactcggcccaacaatattgtgtcgatgcaaggggcgacttcagccaaactcaacaaaattgtcttatgtgaaccacggatttattccgatgctaaaaaagtgagtaaaaacttgctagaaaataaagccgtgattgtgaacttcacgcgaatcagcgctgaacaagcaactcggattgttgattttctaaccgggaccgtctttgcggtcaatggtgaaattcaacgggttggtgaacagattttcttatgtacgccacccaattttgaaatcgatggaaatttatcggatatcgttgaccaaaacgatttcgatactgaggtgaattaagtggtatcctttttaattctggttttaacacttttgttatacgctgttaaaatctatttaggtgtgattgcggtctattgtttactcacttggttaccaggtggcatgcaatcagggctaggtcgctttttagcgcgactgacagaaccatttctaggtatttttgatcgggtattaccatcaatcgctgggattggtttttcaccaattgtcgcggggtttgtgctatatcttgtcgaacgtggcttggtcacaatcatgaatttaatcataatgggggcttaatcgatggctgatcagacagatctttatcaacattttagaaagtctgaagcgccgtttgttgcccaagttttgagctggttaaatcaagctgcaactgagtatcgaccgattttgactgattttctggatccacggcaagcgtatattttacaaagtttagccggtgaaaatggggacttagccgttcatttaggtgggggctacgtcgatgctgaacggcaacgagcactaattgcacccacgtattttgaaccgcaggaatctgattttgaattacaattatttgaaattcgctatcccgttaagtttgcccaactgtcacacggtaaagtcttagggactttggtgaatgcgggaatcgatcgcgacgtcttcggcgatattatgacggatgatgtgcattggcaattttttgtcacgcaatcgatggctagttacgttaataatcagattacaaaaattggccgggtcacggttcgtttggaagaattgaattatacgcaactgattgtgccgaaggatacgtggcaatttgaacaaacaacggttagttcttttagattagataccattattgcgtcggtttataatttatcacgacaacgtgccaaggaattggttcaaggtcataaagttaaattaaattggcaagaatttgataagccagatttcgatttagcactactcgatattgtgtccgttcgtggttttggccgtattcaactcaaatcaattgatggacaaacgcgtaaagaaaaataccgagtgacgttgggtattttacggaaatagtagcaattattggaaagatggaggaatttcaaaatggttttaacacctttagatattcataacaaagagtttaataataaaatgcgtggttataatcctgatcaagtcaatgactttttagatcaagtgattaaagactacgaaacagttttgaaagaaaacgatgccttaaaagctgatttgaaatcaagtgacgaaaaagtgacttatttcaacgaattaaaagatgctttgaaccaatcaattattgttgcgcaagaagcagcggataaagttaaagaaaacgcgaaacgcgaatctgaaattatccaaactgaatctgaaaagaacgctaaatcaatgttggatgatgcgaccgaaaaatcaaatcacatcattgaagatgcgactgaacgtgccaagcggattgcaatcgaaaccgatgatttgaagaaacaaactcggatcttcaaacaaagattacaagtgatgcttgaatcacaattggaagttgttaagagccctgaatggactgatttgttagctaaagatgaattggctgatcatcaaactttgtctgaagaaattgatattactgaacttgacaacaagggtgataatcaagtaaactctacaacagaagcagttaagccttggggcgaaatagctgaagatcaagttgaaacgacgcaaacgattgttttccctgatgatgatagtatgtcagactctgaagaaactgaagatgctgaagtaacgactgatcaagcttacgacccaatcgaatcatcaactgatcaagttgataacgacgaaaacaagaactaacagattaaatatcatgatagcgagccaacgactggtggaaggttggtaatgctctatttaattatggatcaccttgttgttttttagatgaaatgagtagtctagaacgaatgatgcccgttaaagcatttttgaggagtgtttttaacgctcaaaattaggtggtaccacgaagatttcgtcctatagacggaatcttttttgtttggcaaaaaataagaggagtgatttgatgcgtattaaagaaacattaaacctaggcaaaacagcttttccaatgcgtgccggtttacctaaccgtgaaatcgattggcaaaagggttgggcggataataatctataccaacaacgacaaaaattaaatgaaggcaaaccaacctttgtcttgcatgatggccccccatttgcgaacggcaatatccatatgggtcacgctttaaataaaaccagtaaagatattatcgtgcgttataaatcaatgaacggcttccggtcaccatttgtgcctggttgggatacgcatggtctacccatcgaacaagctttggctaaaaagggtatcaagcgtaaggaaatgagcttagttgactatcgtaaattgtgttacgattacgcgatggaacaagttaacaaacaacggcttgatttcaaacgtttaggcatttcagctgattgggacaacccatacatcacgttgacggctgattttgaagctgaagaagtccgcgtctttggtgaaatggctaaaaaaggctatatctataaaggtaaaaaaccggtttattggtcaccatcatctgaatcaactttggcagaagctgaaattgaatacaaagatatcaaatcaccatcgatgtacgtcgcttttgacgtggttgacggtaaagatttattagacaccgacacgaaatttattatctggacgaccacgccttggacgattccagccaacttagggattgcggttaatccagcttttgattacgttcaagtcctagctgacggtcaaaaatacgtcgttgctgctgaacgtttgaaccaaatgactgaattattagactggcaatcagttgaaatcttgaagactttcaagggggctgatatggaacgcatgacggcgcgccatccattgtatgatcgtgaatcattagtcatcctaggcaaccacgttactttagaaaccgggactggtttagtgcataccgcacctggtcacggtgaagatgattataatgccggaatgaaatacaagttgcccgttttatcagttgttgatagcaaagggattatgaccgaagatgcgcctggtttcgaaggtgtttattacgataaagctaatccaatggtgactgaagcgcttgaaaagaacggttcattattgaaattagacttctttacgcatagttaccctcatgattggcggactaaaaagcccgttatcttccgggcaactgcgcaatggtttgcatcgattgatgccttccgtgatcaattattaaatgaaatcaataaagtcgctttcatgccggactggggtaaaacacgtctttacaacatgattcgtgatcgtggcgattgggtaatctctcgtcaacgtgcttggggtgtgccattaccaattttctacgctgaagatgggacggcgattattacgcctgaaaccaatgaacgtgtcgcacaattgtttgctgaacacggttcaaatgtttggtttgaatgggatgctaaagacctattaccagctggctttacccatccgggtagccccaatggtgaattcactaaagaaaaagacatcatggatgtttggttcgattctggttcatcacatcaagctgtattagctgctcgtgacgagttaacttatccagctgatctggtcctagaaggctctgatcaatatcgtgggtggtttaactcaagtttaatcacgagtgttgcctttagcggtcacgcaccatataaagcagtcatttcacaaggttttgttttagacggtaacggtcgtaagatgagtaaatcattgggtaatacaattttacctgagaagatcatcaaacaaatgggcgccgatattgtccgcctctgggtcgcgtcagttgatgctagctccgacgtgaaggtcacgatggaaaacttccaacaagtcagtgaagcttaccgtaagattcgtaatacgatgcgtttcatgattgccaacacgagtgatttcaatccagaagccaacacagtggcttatgatgccttaggttcagttgatcaatacctattagtgcgtctgaacaaaattattgctgattgtaaggccgcttatgacgtatacgattttgcaacggtttataagacgattaacatgttcttaacgaacgaattatcagcgttctatttagattttgccaaagatgtcgtttatatcgacggtgaagatgatcctaaacgtcgtaatatgcaaacggtcttctatgcggtcttggtcgctttaacgaagttattgacaccaatcttgccacatacggctgaagaaatctggagctacttgagtgaagctgaagactatgttcaattagctgaaatgccaacggttgaacattttgctggcgaagacgatttattgaagacttgggcgggctttatgactatcagaacggacgtcttaaaagcccttgaaacggctcggacggataaagtgattggcaaatcattggaagccgctgtgacgttgtatcccaatgctgctaatcaagcattgttagtcaatttagatgcggatctcaaacaattattgattgtgtcacaattaacgattgttgaagaaacggcacctgaaaccgctagtcaatttgatggtttagcagtcgttgttgcccatgcagaaggtgacgtttgtgatcgttgtcggatgattaagaccgatgttggttcaaacgagaagttaccaatgatgtgcgcgcgttgtgccgcgattgtcgaagccaactatccagaagcactctctgaaggtttagaaaaataagcaaataattttaaaaagtatgttcactctagagaagagtggcatacttttttattaggcaaagctaacgattacatgatggctaaattaggatttgctcatactgatgttcaagattggcctagtttgataagcttgaatgagtgcaagaaagggtgggtaaatggtacaaccacaggtgacaaaatattatatggggatggcgttgatgaccgcgttgagtcgtcaacgaaaatcaaaattaacggtaaccgcatttttaaaagaggctgaaatctgtcgaacgacattttataatcactttccagatgggatatgtggcttatatcggtggctgttagaggatcgcgttttaaaagaggcgcgcgaaagctttgaagcaggacagtggcaagccggctgtcaggtgattattgattttattgcaagcaatgcaaacgtctgtttaaatttataccggttctccgacgaaacggaacgtcggcggttctttaaacgattttccatggatattttgggcagctttctattgaaatatcaggaacagttcaccgaatcagaacgggcgtgtttcattgagttctatagtgatgctctgatttgccaactggagcactggtttgattcaggtttgaagttacctaaagaacaattgaatgaacgtgtgacgtttaatttagctcattttcaacagattttggccagtgagcagtgaacagtttagtaattctgttcagattataaacagattcatgaatctgtcactggtttatagcggtagaccaactatactaagggtgtaccacaaataagcaacaaccatcataaaaagccatcggcgtcagcggatggctttttgtgatggttgcctattaaatgacttttttaataattaatttttagattcatcacagttagtggtatattaaaataaagtacttttttcacaaaataaaacaggaacaacccgttttggcggattattcctgtttttaagaccttaacctaacactaaatagtcttcaatattcatgaaatacactttataccaagttaagaacgtgaaaatcgtccaaattttacgacgaccattaatccgttgttctttattcgcgtctaacaaggccaataacttcggttgatcaaagaattcagccacaaatgcttcgctgaaaagcgttttaacttgttcataatacttatcggtttccaaccattgtttgattggcactgggaaccctaatttaggccggttcgcccaagcagcaggtaaatgtttagcggctgcttggcggtaagcatatttcgtatctttgctattcaataaataatccgttggcacttggcccgccgtcttagcgacttcgggatccaagaacggcacccgtaattccaaactatgcgccattgaaattttatccgctttttgtaaaatatcgttcaacataaagtggtgtagatcaatgtattgcatttgtgaaacgggatcggcctctttgacgttttcaaaatcggcttgatagttaccttgaatcgtttcagcattttgataagctggtttcaaataactgttcgcttcatccgcgccaaaaatactgggattttcgatatcatagatcacggattgtcccgcataaaattctttggggttggccaaattcgtgtataaatgaacgcgacctgggaaggctggcatctttttaaccgtcttggctaaatgggcccgcgcaccttttggcaatttcttcagagtagacgtgaaggctttgatcgttgaattatgcgaatgcatgccataattgacatacccagcaaataattcatcagccccttcacccgatagcgcaaccgtcactttttcacgcgcaaaacgggataagaaccacaatggcacacatgatggattaccatctggttcgtccaaatagtattgaatcttatcaaattcggcaaaagcgtcatccgcattaacccgtgtctcattgaagtttaaacccagctcttccgctaaagcgcgagcggccgtcacttcgttataagtttgatcatcaaaaccaacactgaagacttcctgtggttttaaaatactggtgacgtaactactatcaaccccttcagataagaaggcgccaacgggcacgtcagccacgttgtgcattttaatggattcatcaattgacgcatcaattttttgaacttcttcttcaaatgataattgagaaggcgcaaactgcatatcccaatatttttcaatatcgagttgaccatctttataagtaaagtaatgacccgctggaaaacgataaacccctttgaagaaagtttcagttaaatcattatattggttcatcatgaatgatttcaacgccttttgattcaaggttggtttgaaatctggatgggccataaaggttttcaattcactactgaacatgaaagtcccatcgtctaacgttgtgtaatacagtggtttaatcccgaagaaatcgcgggcaccaaaaatcgattgttctttaagatcgtagatgacaaacacaaacatcccgcgaatcttagtcagtacgtctttaccccattcttcataagaatgtaagattgtttcagtatcagaatccgttgtaaattcatggcctaagctcactaattcagtccgaatttcacgataattatagatttcaccattaaagaaaatcaatttgctgtgatcttcattataaatcggttgatcgcccttggttaaatcgataattgataagcgccgaaatcctaaagccacttggtcatcaataaattcaccagcgccactagggccacgatgcttgatgatgtccatttgatggttcaatacttcttttttctttggcaaatcaaatagtccgcccgcaaatccgacaatcccacacatatgtttagcccctcttatcctcttggttcacacccgtttatatcaaaactaaataacaattaacaggcactcttaaccgattaattgctattgtatatcatactatattttgtttctaaattgacctaacaaattcgtaagttcgtgcttatttcaataaagtcgcaaccgcttctggtgtgactgcttgacccacttgccagtcatcaggcaagaccatgatgcctttatccggtgcgttgaccacgccaatctcgcgtgctgcgcaaatcataccatcactttgaacgccccgtaattgacctggccagataattttaccttctggcatgaccgccccaacggttgccacaatgactttttgaccctgtgcgatattgctagcgccacaaacgatttggaccgtttgacccggtgcaatctccgtttgggtgatgtgcatgtgatctgaatctggatgcatatcgcattcttggacataaccgaccacgatatgcggtgtttcatcagccactaaatcagctggaaagcctgctgcagatagcgccgtattcaaagctgctacgtccgcaatcgttaacacttgcgtcccgttaaactgtaattcgggtaaaatttgatcaatcgctaaaaaattataaccaattgtctgatcattttgatcgctgatccggacaatcccctgtttttcagttgaaacttgttgttcagcatcgggttgaaccatgaccactaaaatattttgaaatgctttttgattcatactggcgattaacatttaaaaactcctttagactaattcaatgacttgataaattcagtaatttcccgttttgttttccgatccttgttgacgaaacgcccaatttcacgaccgtccgcaatcacgacaaaactaggaattccaaaaatttcccattcttcacaaacatcaatgttttgatcgcgatcaatttgaataaattgataatctggaaattcagcttcaatttctggcattgctggtttaataaaccggcaatcgctacaccatgttgcggtaaagaataggacgtgttttcctttggtaatgagatgggttaaattagtatcatccatcgttgcaaaatctttcattatgcaccccttcaagttttgttctcattttaatataagcggtttgccaaaaaaagtccactcttgttgactaaaaattatgctatactaaacaaagataaaattattgaggagtttttctttgaaaaaacatagttcagttgtcaaatatcttttaactggttttggacttgcgctagcaacaaccatcagcgctcgtcagtacaaaaaccaacaaaaagccattaaattaaatcagattctagaagacgtcaaggctggtttgaaacacgaaggccaaatcgtcggtgcttggattgaagaaagtccccacctcttttcgcaaaataaacggacttttcccgtttatcaaggtggcgtgattaccgaacaatcgaacggcaccaatcagttccactttaaggtcgatgctaaaaccggtgtcgtcatcgaattttcacaattacagccctaaaaaataaacgaaccatcctggattgaggatggttcgtttatttttttaggcgttatctgatttaaaatgggcttctaggcgataaatccgatcgccccgtttgctgaatttttcttcatattcagtttggacgttttcaatcgctaagtcgctcttgtgtaaatctagtgacacgtcatccaacaacatcccataagcattcaagctgcacaatgaatattcaaacaatccttgattatccgtcttaaaccgcagataaccatccgcttgcatgatttgttgatattcagcaaggaacgtcttgaaggttaaccggcgcttttcatgacgcgttttaggccatggatcggagaagttgagatagacaccggcgacttcattatccgcaaagaaagtcgttaatgacgcgccagtccccaataacaattgaagattaggcaattgcaattcaacttgtttctggagaatgacggcaatcgctgattcttgaatttcaacggcgataaaattccggtccggatatttttgcgccatctgagtgataaattgacctttaccggaaccaacttcaatataaatgggttgttcttgcgcaaaacgagattgccagtgtccggcaatcgtttcgggactcactaaaatcttttcgggattggcttcaattaaatccttagcccatggtttatttcttaaacgcataacgcactccttatttgataccaattaaaaaagttggaccagcgcccaacttttggcattcatgttttaatttatttcagaaactaattctttcaaacgcaatatgtcatggttcatctcagtaaaacgaccacgttgataatggtgcttaatgctttgaagtaagttcaaactaccgtaccagaacacgcgcgccattaattctggggtcacgtccaagccgtaagtttcaagccactcctgccattcttgacgtggaacatattgaaataaaatcattccgaaatcgactgctggatcagcgagcatcgctgaatcccaatcgactaaatacaagcgattaatatctgataacaaccaattcttatgattcaaatcgccatgacagacttccattgaaggggtcttcaaatcagccattgtttgttttaatgtttggacgacctgctccaataacggatgttgccgtaaatcttggggtagatcgtaaaagtaagtttgcaacatttctggtgcgtgccatgtttgaccgcccacttttttgagcatccgcttcaacaataatgattggtgaacccgtgccaataacttggccacttgcggactgttcatttcagcccgtttcaaagtccgaccgttcaaccattcttgggcggttagcacatcccccgtcgcaattcgcttggtccaaatcagcttaggcgtaatggcttctgctgaaagagccgctaaaaatggcgatgtatttcgttttaaaaagattttttccgacgcacggacacccaaaaaggcggtgccagtgtccccaccagctggttgaacttgccaaccagtctccaagtcgaaattcatcggcctcgactcctttacattaagatcaagcactttcccacgtgctgcgacacttcaactgacgataactaggataatcatataatagtcaaacgccttacgtcaagtcactaaccgttgtttctaacatttattttgttaaacgccgtggtagatagaattgaacaaagccataccctaagcccccaaaagcaacgatactgactaaactctgcccatttaagccaaaacgaatcaagattaaaagactcaataaaataatttcgattgcgactaatcgccaaataagtcgtttaaaggcctgcaatttggttgtttgcgcgactgggtaaagatgcgtaaaaatattttgatcgtattgttgataaaacggtagtagttgaaacccaacgagatagattaataatagtcctagcaacaatgctaaccaccaaatttggctgaaccaaataatgatgccaccaataatgactaatcttaagtataaaccgctaaattcagtcccccgtaaaaagccccgtagatataggaaatagaatggattcgcattgtttacactcaaccgctgaatcagactatctaaatagcgacggcgtttaacctgactgtttaagccgggcacatcggtgaagagattatacaggcgataaatccgacccattcgagaatcttcggcactgactgcagtcaaccaatcaaataactgcgtggcttgaatcttagtttgttgttgccgttgccaatacaaaagcccagccgcaatcactaagccagcgattgaccaacccaaccacaattgactcgccactaatacccagtcaaccaataaccataaacccgtttgttgcgtactggttccttgataccactgaccaatttggcttgaaaagcgtcgacttttaatcaaccaaagcgtggctaataaaccgagtaacatccaagccgggaccgtcttagtgattaagagtgttggggccactaataacgtgaccatggctaaccaactaaacggtaaccacatgctgtagcgttgcgccgccttcaaataactcggtaattgcgattcttgaggcagtaagaaaacactgtccgcttcatgtagtagcgtggctaaccgaccaaaactaagactggccagtaacaccaaactaatcaccggttttaaccaccaactcgtcggatcaattgctttaatcgcattggcataagtgtaacccaaagcgcctaataagaagataatcgcaagcacaaaatggtcattaaagaccaaccgtaaatatttaacttgttgattgacgtggcgtcgcacgcgttcttgccataatgattgcatgtttagccttctttcgtcatctgtaaataaatatcatctaagttagcgtccgccatcttaaattcagtttttaattcagccaatgtgcccgttgcgcgtactcgtccctgattcaataaaacgaatgaatcagcatattgttgcgcggtcgctaaaatatgggtcgacattaaaatcgctgccccttgcgctttcttatccgcgatgatgtccaataaatcatgaatcgctaacgggtctaaaccagtgaacggttcgtcaatgataaataaatcggcatcggtcataaacgcgttgacgatcatcaccttttgacgcatcccttttgaaaaatggactgggaaccaatcaagcttattatccaaccggaattgttttaatagttggttcgccttcacccaagttttctcgggatctaattggtacgccataatcgttaaatccagatgttcttttaatgttaattcagggtataaaatcggtgtttctggaacatacgccattttttgccggtattgattcgggttcgattgtaacgtgaccccgttcaacgtaattgtcccagcttgtggtgtcaataacccgataacgtgtttaatggtcgtcgacttccccgccccgtttaacccgattagaccaaccacttgttgatctggcacggtgaaactaacgtcttttaaaaccggtacgtgggcgtaacccccggttaattgtttgatttctaaactcattttaattacctcgttcatttttatcgctttaggtctgcaaccatatcttaccatgaacactacatactgtgtatcatcttaacgatttttttaaagtgtgtcgctagcaagctaacagtagcgcaaataggcactttatgatagcatgaacctagatttagacgatatgaaagtgagtgactcatcatggataattgtattttttgtaaaattgttcgtaacgaaatccctagtacggttgtttacgaagatgaccaagtgaaggccttcctagacttaacccaagccacacccggacacacgttgctaatccctaaaaaacacgtcgctgatatttttgaatacgattctgaattggccgcgacggtctttagccggttgcccaaaattgccaacgcgattaaagccagcgacccggcgattaaaggcctcaacatctgtaataacaatggcgaagtcgcttatcaatccgtttttcattcacatattcatctgattccgcgctacggcgcacaagacggcttttcaatgcagtttgtagatcattcagccgattacacaccggcacaactcaaaacgattgcggaccgcattcaggcccaactggaggttaactaatgggattttcaaaagggttattaatcggcggcctattgggcaccacttatgcactactgaccgctaaaaaaaagggtccccaacggcaacaagcggtggttgattatttaaacgacatcacgaccggcgcccaagatgtacaaacgagtgccacgcaattaaaagaagcgtctaacaacttagccaccgaattaaagacgaccgcggtcgattccgtcgccgacattagcgaggcacttcaatcattttcatttgaagcggcaccccgaattgctcaaatcaacgaatcattagaacgtctcgaaaaaaatttaccccagtaattgttatttaattaactcaaaaatcattaagcccctcaacggattgcggccatcttcacgaaaaacctaaatttgaaagttttgtgaagattcagggcattgatttaatttaattagtttatgtgttatattaattgttgaattcataattcagttcgaatttattcataatacttgataaggatgtgtcagataatgaaaaaatggctattagccgctgccagtttattaatggtagtctcactagcaggttgtggtagcacaacaatcgcaactttaaagggtggtaaagtcactcaagccgaatactacaaggaaactaaggaaacaacgactggtaagcaacaattgcaaaccatgatcttagaaaaagcccttgaagaacaatacggtagcaaagtgtctgataagaaagtcacatcaacttataacacttacaagaaacaatatggttcatcattcagctctgttctctcacaaagtggtttaacaacttcatcattcaagaaacaaatcaagactcaaatgttaactgaagcagctttaaaagctaacaaaaaagtcacaaatgctgatttgaagaagcaatggaaatcatacgaaccaaaagttgaagttcaacatatcttagttgaaaagaaagcaactgctgaaacagtcattgcagaacttgctaaagacaacaccactaagaacttcacaactttagcagctaaatattcaactgatactggtactaaaaaagatggcggtaaattaccaacatttgatagcactgatacatcattagattcaaccttcaagactgctgccttcaagttgaagactaacgaatacacaacaacgcctattaagacaagctatggctaccacgttatccgcatgatcaagaaccctggtaagggtaagatggctgatcacaagaaggaattaacgagccaagtttatgctaaatggatgactgatacaactgttatgaacaagatcatcactaaggtgcttaagaaagctaacgtttcaatcaaagataaagacttatctgacttactttcaagctacggcgtgaatagtaaagcatcatcttcttcatcttctaaataagcacattgaaaaaggcgtccgacaaattgtcggacgcctttttttggactattcttctaacgcttcatcgtgttctggtcggtagaattggcgaccatccattgcaaacatccgctccgtataatgcccgggttccgcatgtttcaaagactgggtcatcatcgtgatactcgcatctagttcatcgatttggtgtaacacatcggcctccaagacttgtggtctaacgggcgatccgtattccaacaaaccatgatgggctaacacaacgtgccgcaaaagcaacatgtcttcactattggtatcaatcttgagcgtatcgcaagcacggacaatttcttcgtcgaccaagacgatatggccaattaagttaccgcggactgtgtattcggtcgaaattgggcctgataattctaacgtcttccctagatcatgtaacaacacgcccgcaaataataaggagtcattgatttgtggatactgagccgcaatggtcttcgctaggcgtaacatcgataaggtgtgataagccaagccacctgcaaaagcatggtggttggttttagccgctggataactaaagaattctggttggtgtttttgtaacaaatggcggacaagtcgttgccaattcggatttttaatctcaaataatacttggctgatttcttcttgcatctcttcgacttgaaccggtgctttcggcacgaactgttcaactgattgcggttcatctgccgtagtttcacgcaacttatagattttaacttgcggattactttggtacaattcccgtttcccttgtaaatgaatcacttggcccgcggtaaatttggtaacgtccgcatcggaagcgtcccagtatttaccactgatttgacccgattgatcttggaaagtgaacgcaatgaactgtttcccattcttggcaacccggacatctgccgttttaattaagacaaacaaatcaatcggttcgtcattttgataatcaaatatttttttagtgggcatctatctgacctactttctctaaatttaaccaatgtgccgctccgaagacggtttctgttcggggattggccgttaaataaattacctgatgatgttcgctcaaacgctgtaataattcccagatggccgcttgacgttggtcatcgaaattaacaaaaccatcatcaattaataaaggtaacgataccacatcggcaatctcttctgcaaatgcgaaccgtaatgcgatgtagagttgttcggcggtcccttgtgatagctcaccgacttcaaataacacttgatcggcgcgcaagaccgtcatcacctcttcttcaaaattaatttgctgatatcgattttgcgttaataaggcaaagtaagtcgttgctttaaccaatattcgtggaaaacgttcctgcgaagccgcctttaaggtggcttgaatccagtcaatcgccaattggttagccaaccaagcttgcgctaaatccgtaatgttggcttctgcttgtagttgttcttgccgtaacagttgatattgatcgtcatcgactagcttttgttgagtgacactcagttccgcaatgacttgttgttgttcttgcagtgcctgattagcaattgccaattgcgcttgttgttgtttataatcattttctaactgcgctaaatcggtaacggcttgcaattcaggtaacgcttgatctaattcagccgctaaatctgaacagcgttgttgagcgacttgccgttgtttttccgctttgtaacacgcctctaattcggccgctgtttttagttgagcactggctagtaattgcttttgggcctcgagtaatgtcgtttgtttagccgttaatcggatcacttgttgttgataatagtgataactttcattactttgagccagtgattgttgtaattgtgcaacccggctcttaaactgatcaatctgggttaagttaaccgcatcgctaccttggagcgcgccgacccattcttgtgcaaactgccattgttggtaataagtcgttaattgattttgcagtgtttcaaccgccaccgtttgttgcttaatttcggtcgtcaattgtgcgacccgtttcaaatcattttgctgattcaacacaagcgacaccgaagtttcagtcgcataaccggcttccgtcaaaatagcggtggtttgttgttgagatgcctgtaactgcgcttgactagcggttaacgccgctgcttgcgtttgttgttcatctttcagtgcgtctaattgggcgagtgcttgttgccactgcgctttttgttcaacaccctgagtcagttgttgttgggcttgttgtcgttggtaccaaccgtaacccaacacgagtaaaccgacaatcgcgcctactttaaacacgcctggtaagaaaatggtcaataacaagatcccaccaacgccccagaaaatggtttggttctgacgagttggccgcaccgttgtggtttctaattgattgactaactgttcttgggtggcgacttgggtttgcagcccttctgttttagacaataagacttgttgttcagtcgctaatcgttgttgttggtcggaagcttcttgcagttgttcaacttggtcggccgtcaatatggcaggcacttgtgctccccattgatgttgagccaccaattgtgttttttcagtcgttaacttcgtgagttgcgcttgtttgagttttaaaacttcaagttgttgctgttgcgccgacagctggtcaaacagcggtgtgacagtggcttgattggcttgataaaaacgaaactcaccggtttgatctaaggtctcttggacctctgcaatcgtcgcttgcgcattttttaattctgtttcaaccgcccgttgctgttcgactaaggcttggtattgggtataaatggttgcgtcaaaggccgtcgcatgtgctaattcactctggagtccttgccattcttgataatgcggccaacgttcaatcaaccgttgttgctggttgattgtcgcttgtaactgttcaatctgagccgttaaactttgccgtttagccgtggcttgttgtaatatttgcgcattctgctcatacgcttgatagccggtgctggcttctttgacggtctggactaaatctggataacttttcaaagcctgattcaatggccatttccgaccagaaggtttataaattttttgaccttctttatccagtgctttagcaaaattcaaccattcgtgactaccaaccgccccaatcgtcaacaggtgttgtaagaagtcagcctgttttaaaccgaatatctggttaagatcctgttgattggtttcgaaaatttgggtgaacaacgcttcatcggccggggctaataaggtcgctaaataatcggcgccaaattcattcccttgatcaatgaccgttacatcaccaccaaacttgccatcaatccgccgaatcacaagttctcgttcttgatattgaactaataattcaccgccgtattgggccccatttttaggtttatattgttcgtaacgttgtttgcccgaagcaaagccaaacaaaatgcctttaatcagtgccgttaacgttgatttaccagcttcgttttgaccaaaaagaacttgataatcggtcgctaaatcgatgacctggtcatgccatttgccaaaaccgaagatggtaactgttttaattcgcatgacttattcccccaacttattttcttgtagaatcgtctcaaccaaggcttttaaatcggcttgatattgctcatccgtcacggcatctctaataaagccttctttcatcagcggttgcgctttatcccgaatatactctggtgtgaagatttcagcggcggcagcttgccaatacgtttgatcgatttggctaaactgttgttgttgatcaaattttaaggttaacgcgtacggccaatgcagcggttgactgttggtcaattgttcttgtagaatcagcaacaattcatcgtgattaatccgttgcaataagtcggccgataaattctgagcgtgcgttaattccaaactgactaaacttgcttgctcactttgttgtaattgcgcactaatttgggtttgtaattgattcaatgacatttcgggttgaatctcaaattgttgtcgttgccattcaatcacggtcgttggtcggaaatctaacttgaattgacctgcatccgcgttcaccacgtaaaagcctttttgaccgggttcatttttatggcgtccctgtaaattacccggataaacaacgtatggccgttcttgtagaatttggcgtttgtgaatatgccccaacgcccaataatcgtattgcaattggttcaactgacttaacgtaaacggtgcataatggtcctcatcaggattggcttgttggctaccgtgaatcgttccaatcatataatcagtggtggcacgtggtggaaattgatcgacttgattggccgttaaccaacgttgcccatagctaaacccaacaatcgtcaccgtttcttgggccttagtcgttaacgtcatcgtttcaacgtttgttttaaaaacgtgcacgtttgacggaaattcaaaatgaacctgttgttcatcccaataatcatgattcccgtaactcaaataaaccggaatctcgacggccgctaagcgttcaaattgttgttgtagaaatcgttgaactggtaagctctgcgcttcttgatcaaatgaatcaccgaccagcagcacaaaatcgacctgttcatcaatcgcggtttgaatcagtgttttaaaagccgtaaaggttgattgatgaatcgtttcccacaaagtcgctggcgcttgtttgagccccataaagggactatcgatatgggcatctgcagcatggataaatttcattttgaataacgcctcaattcttaaaaatcgattttattaataggctcattataccattgcaataggtctttagaaagcatcatcgaacaaacgttcttaatgatgccatcaaaaaatccgtccataacctagattgggtgacggcggattttttgctgagtgcacagttgctaaacgactgagtcagcactctatactgaaatgtgctttctcaagcaacgctttccgcctaactacaaaaatcccttatggttaaagaacaccataagggatttttttggttatgctcaagcgttaaccgcttgagaaagcactctatccttgatagatatctgcgattggttttgagatgatttggtttaattcgtccattaattggcttaattgacgttcttgttccattaattgtttgatggcgtcgatgtcaccaattttttgagcaagttcttggatttctttgatttcgtcatccgttaaatcttgaccttgcatttgtttttgttgtaatgtcatttgttgcgtttgaaattttttgaacattgcaaaagcaatttcatcttttttcaaacttgcaaaagcattttgcaaccctaaaaattggggtaattcttgtaagtgaactgccatttggttggcatcatcatgaatattaactgtcatttgaactgactcctttagctactttatttaattaaaaaaccctttcacggtattataccattgattggccgtatctttcgctttatttaccccatttttaaatccagattgaatcgaatcgactaattgattcgaatctttggtggattctttcttagcaagggtttgcgcgtcctctgtatcaaaactggtttgggcagtcgtcggtaataatgcttgcatttcgtatttaaaaatcggcgctaacccatcgatactcgtgttggtcataaaatggctttgatcggttttatcataacccatccaagtcgccacaacaatatccggtgtataaccaatcaaccattgatccttagtcccaaagccgtaactagcaggcacttcggtactcccagatttaccagcgacttgatacccgtctggtttcgcgtatttccccgtcccgttattgtaaacgccgagcatcatactcgtcatttctttggccgtcttcttggtcataatccgggttttcgaattctccgtattatcaacgacgaccgcgccactggcatcaacaatcttgcgaataaaatgcgtttcagatagttcgccatcattggcaaacgccgtgtaagcactggccatttggtatggcgaaacgccaccttcccagccaccgagtgccatcgctaagttttggtcacttttcggtactgaaatcccaaatttttcaactgatttaatcccgcgtttcaaaccgatttgatttagcaaccaaacggccggcgcattagtactattggcaatcgcttggtacatcggaattgaaccgctgtatacattatccggattagtcggtgtatagttattcgtcccgtaactctgtttcttatcttctagagacgaatcgtaatggtaaccgtcttcgatggtcggtgtatagaccgccaacggtttaatcgttgaacccggttgacgtttcatctgcgtgatgcgactgtaaccgcgaatcgtgtaatcaccccgaccaccaacgacggcggataccccaccggtttttggattaatcgcgatggaactgccttgaacaaccgtcccgtcagcagcgttatctgggaagagataactttgttcaaaagtcgtttccatcttactttgttgggtctgatctaatgccgtataaatcttgtacccatttttaactaaatcttcttctttaatcccaaatcgattgaccgcttcattaacaacttcgtcaaaataatagggatatttataactatctgattgttcataagtatttttaaccactaaggtttctttcttagcagcgtctgcttgggcctgggttaatttattattatccaccatcaggcctaaaatcagattacggcgcgacgttgcattatccaaatgctccgccggattgtaataactaggacttcgcaacatcgccgcaatcacggccccttcgctagcgtccaactcactggcattcttgccaaagtagcgtttagaggcgtcttggacgccccaaaccccgttgccaaaataggcattatttaaatacatggttaaaatatcttttttagtgtatgttttcgtaatctgaatcgctaagaataattcttcgaacttccgtgaaaaagtttgcttctgacttaatttcgcattcttggctaactgctgggtcaacgtactcccaccaccggagatttccccgtgatgaatcactaggttgaccgctgcccgcgccatccccttgatactaaacccaagattactgtagaaggttcgatcttccgtcgaaatcaccgcatcttgaatcggggttgaaatctgttctaactcaacataggtccctttttgcgaatacaaggaacccgcccgactgtctttgatatcataaacaatcgatggtgattgtaaattcgctttaatatcaccgacattggcggttttcgctttaaaagttaggaaactactcatcacgaaaatcagtaataacaccgctagaattaaccagcgagtcagttgtagacgataccagacaaacttaatcatgcgccatactcgtttaaagaaacttttaaacgctgattttatcggtgatgcttgcttattcatacaatccctcttctgatcaaattcacttgatgttattaattgtagcatattcccgaatcacaactagtagctgccgttaacatttataatcttttaaaatttacattcgtcgctaaattcgctaaactggaagcttaaaggtggtttccccaatgacaatttatcaaaaaaaagtaactttagaaacagactttagcccgatgtcagtccgcggtttactcaatcattggctgattccccaaaaaatgcaacatttcttgagagttgatcagaatattttagtcaacggtcagtatcgcgccttcaaccgcttcgttgaacccggcgaccaaattgacatgactttctctgacgtttcggtcaaaactcaagaatatgatttagatcaagcccaactgtttaccgttctttatgaagatgctgacttattagtggtcaataaaccggccggcattaaaacccatcccaaccgaccacacgaaaatggcacgctcatgaatcaggttgctacatacttagccgcacaaggtaaacacgcctacatggttcaccgcattgatttagcgaccagcggggccgtcatgattggtaaaacgccaatcgtaattggtattttaaaccggcaattgagtcaaaaaacaatggcgcgccaatacatcgctgtcgtcaatgatccccaacaattattactcgaccacgacaccatcaacttccccatcgggattgatcccgataatcaacgaaaacggcaggctgattacatcaacggcctatccgccattacccattaccagttattaacccggcagaatgacacggccactttggcggttaatctcgaaaccggtcgaacacaccaaattcgcgttcatctagcggggattgatcacccgattctcggtgatccactctacaacccgtcagataccacgagccgtctattattacacggtcagacgttacgctatactgaacccttcacggaccatcagcgaaccgtcattgccccattaccaaccgcatttgatccgtatcttaatcaacctcaataaatagttatacgtaagtcttagtattttgatattaagcgagcattcttctttgacgcgcaccagaactcatcaatttccgttcaaatttaaaatgcggtctatccttagttcgggatagaccgcatttttaacttgatactcaattaataaccgagttctgtcacagcttatttattttcttcaagtttgcgattaattcgttgattaatcacacgattaataatcgcaaataaaccaagcgcaatgacgctgtaagtacatgcaaataccaaatccattctctccgccagcctttcaattaaatgaaaatctattataccatttttatttgaaagtttcagctggtggttaattaggtttagttgcttacagctccaccttaactggcgttgctaaattttctgaaaactgttgatttaatcttgtcgcgcttgcttcatccggactaatcaccacaatcgtgtcatgaccagccagtgtcccgacgacttcttgataattaatatcgtcaatcaaggccgctaataaattaccattactagggagcgtcttaatgacattcatcatctgtacttgtgtcacggatagtgcgacttcgcgtaatttatcttttaatttttgaacttgagtccgttcatccgcatgaaaaacggtatagcggagttcgccattcacatcacgagccttaacgatttgcatttcacgaatatcccgtgaaatcgtcgcctgagtcgcctcaatattctcttttttgagagtctctaatagttcttcttgtgttgcaatcacctgttgattaataatctgttcaatccgtgtttgccggtccgctttcttcacgattgccacctcacatctttaattaattaccttgattataccagttttattgcataattaatgactatttttagaattgtatattaatgaacaaggctaattataccagagatttgtttaaatatcaggtctagtgaatttttaacgattttcaggcaaaataaaaagtcgtctatccttcttcggataggcgacttctcaacttgataggcaattgataaccgagttctatcacagcttgttcgaaagctctctaagctgttttgcgcgctttacgcaccttaaagattgttaatagcgccactgcaacggccacccctgatagaattgagataaagaataagccgatattattagtagcccctaacaccccgacaattgggccaccgtgtgggacggcatcggtaattttgaaaatcatgccgaccgcactcgcaacggctgaaccggcaatgatacttgggaaaacttgtttaggattggctgtggcaaacggaattgccccttcggtaatcccaattaagcccattaaaatcgctggaattccggctgatttttcttcttcagtgtataaatcacgacgaacaaatgtcgccacgcctaaagccaatgatggtacagcaaccgcacaagccaccgcgcccataatttgtggatgacccgctgtaatcgaagcaaccccgaataaaaatgcaactttattcactggaccacccatatcaacagccaccatcgcaccaatcactaatcctaaaacgatacttgtttccggattcttcgatagcgccgttaacatatcctgtaacgccgtcattaaccatgaaattggggcccctaatactaaaatcaagaccgccgagataatcccaacccctaatagcggaatcacaaaaataggcatgactggccgtaaatctttcggaacgggccaagaattaaaccatttaaccaaataaccagctgcaaacccgacaataattgcgccaataaaaccggtcccagcttttgtgcctaaaatatcagtgttattagcgaccatggcaccaatcatagctggtgctaaagcagcacgacctgagatcgcataagcaatgtaacccgccaagattggaatcatcaacgtgaatccaattccgccgatttgattcatgctactccaaatcgtattggggggaatcaccattccggctttagttgggtgaccaccgattgcaatcgacaaggcgatgaataacccaccaacgacaacgaacggaatcatgtgtgaaaccccgtttaataattgcttgataatcggactttgttcatgactctcttgctgatcagattgagcgacagtcgtttgtttttgaccataaataccggccgtcaaagccctttcaattaatgcgttggcatctttaatggcatccgctgttttagcatacaatacttgtttaccgttaaagcgttcttcaccatcaaccgctacatcagctgcgataattacaaaatcagcatccgcaacatcttgtgcgctcaattcatcttcaacccctgaagcgccttgggtttcaattttaacttcatacccttgtgcttcccctgctttttgcaatttttcagccgccatataggtatgggcaatgccgactggacatttcgtaatcccgacaaactttttcatatcactcactccttctaattaaaatcaattgtgttattaatcaaggtgtataacccctgtgcatcgtgtcgattggcttgtaagtcaccgatgaattcatcatccattaatttacgtgcaaatttagagagcacttttagatgtgttttattcggatcatctaacggcataattaaagcaatcgcaatattaaccggttgatcatctaatgacgcccaattgacgcccgcttcaaaggtgaccaaaccaacaaccgggactgttaaacctttgattgcaatcgtgctaatcactaaatcctcactaattggactggccatcaactcgccgagtgcaataatccgggtaatccgtaaacggtgtgccaattgcttctctaaacgctgacctaacaattgtgacgtcccaatgccactactgcacacaacgaccacgctcactcgttgatcagtcgtatgccgttcaaaaaaggcttcaaaatgtaaactaataaaagctaattcatcatcgtttaaggccacttggtaatccgtttgcaacgctggacgcaatagaaccgcttgatcaaaagcctgtgggaagttacgccggatttcttcggtataggcgttacgaatcgttaacccgacacgcagtcgtttcaacgccgagtttaaatgtaagaccaacccgtgaatcaactcatcatcgacctttagttgaacaagttgttgtcgcaaccattgtgctagactagccggttgacgttcattagtcgtcactaattgcggatctaaatgtcgtgatttaaccgcgactaaatgcaaattaatattggcccgctcgaataatggtaacgtttggttaaagcgacgttctaaaatagcaactaaaatcgccgtttctggtacaatcggagctgtcacactttgacttggcgcgactaactggtttttcaacaaccgttcaaacgtaatcattagatggattgctaacgattgaaattcataatcggtcaacaacaattgcgttttttctaacagttcacctagcgctgctaaggttgtttcgatcaccgctggcgtaaacaaatggtgcaacttttcaggtaactggctattctgaatcagttgaccatcctgttccagtgcctgcgtccgtttaccccaatattgactaattaattcggtcgtagcttgacggcgatgttgctcgtcaccagccaactgcaacccagcatgggtcaccgtaaccgttaattcaaattgctgtaaatattgcttaacttgtttcaaatcgttttcgaccgtgctacgactcacataaagggcctctgcaagattctgcacggtgatggcttctgttcccaataataattttgctaaaaggtagtaacaccgctctgtcttagtttgcggtaattcctgattcgtcgtctctaattgactgcttaaatggccaacatcaccggttaagtaaatgccatcattcggtttacgaactaactgcaccccactacccactaaatccatttcaatttgatccaaataagtcgcaatcgtccgttctgataactgcaagtgcgcagcgatgtcaacgtagtgcgttttgtgctctgccaaaatatactgaataatagcttgttttcgtttgttcatcttttttgcaactcctcgtttcggcccttgacgataattttattttaactattttgtatccgcttgcaaactcatctttttgcaatattaatcttgcaatttatcggatgcgtcaaaaaaaacgaccattcattttgaatgagtcgttcatctagaccgttaattcaattaaattatgttctggatcttcaacaactgcttcataatagccatcaccagtcacacgtggcccgttcaacaagggcagcccttgtgctttaaactgcacgaccagttgatcgaccatttcacgactgtccactgacattgctaaatgcgcatattgtccttgcactgctcgatccaccaattgatcgacttgatgcatgatttccaagcgagcccccgattcaaacgttaaaaagtacgattgaaatcctttagcgtgattttcataccgctcaccgactttagcctcaaacatcatctgataaaatgctttcatcgcttctaaatcgtgaacccataaaccgacgtgttcaatctgcatgattactcgctcctctgattaatctaaactcattatgccaattttcggtagcgattacaactgaaatcaacggcaataaaaaaagactggtcaattgaccagctgaagtaaacccctaaaattggagaaatccaatcttaggggtttttctatgttttcagataaaattagaattgaaatcgttaaaaagtatatttcagggacaagttctccaaaactaatgaaagaatatgggattaaaggatcaggcactgtttcaaactgggttagaatttttaatgaatcaggtattgagggtttaaataatttaaacaccaagacatatccttcaacatcagataaaatgagagtaatcaaatggctcattaaacatcacgctagttatccagaagctgcccatcatttccatattcgtcatccgacaatcatctggtcttggtatcaagggtacttgattagtggtgaaaaaagtttaatgagtcggaaagaatactcaaaaatgaagactactcctaaaactgatgccgaaaaactgaaacaagttgaaaaagaaaatgaactattgagagccgagaatgcctatctaaaaaaactagatgccttaattcagaaagaatcaaaaactgtcaaaaagcgcaaataattgatgaattaaggcctgattttcaattagaaatattattaaccgtcgcgcaaatatcatcaagtagttattactacgctagaaatcagaagattaaaaatgatgatgccgaactaatcaatttgattatcaccattaaaaaacgggataaaaatatgggctatgtgagtgtcacgacagcacttagacgagattatcatcaaatcgttaaccataaaaaagtttatcgaatcatggtggaaagcggtttattaggcacgctgtataatcaaaaagcgagaaagtatcactcatttaatgctgaaaaagataccaatcaacccaaccgcatcaacaatcgtttcgggactgatcgaccaggtcaaaagattgcgaatgatattactgaatttaaagccaaagatggcactaaggcctacttgtcagcatatttagatatgttctctggtgaaatagtcagttatcaaattagtgaacatccaaatacagcactagtgcttaaaccattaaaagaatacgtgaaacaaaggccagattataactatcgaatgaccgtccatactgatcatggcgttcagtatactagtggccaatataaaacttatttaaaaacgcataaaatatttcaaagtatgagtcgtaaaggtaaaccaagagataatgcgcccatcgaaagtttctttcacctattaaaaatagccactattcatagtaatgagtacgaaacatactcagatatgaaagccgctatcgatgaatggatctattattacaacaacaaaagatacaaagaaaaactcggtggcttaagccctgttgaatacagggttaaacacaccgagaaaattgcataaagttatctccaattattggagtctacttcaagcctttcaaaaaattaattattttttgatgttgtagaatgatttgatacctttgtattcagcagtatcgcctaattgttcttcaatacgcattaattggttgtatttagctaaacgatcagtacggctcattgaaccagtcttgatttggccagcgtttgtagcaacaactaagtcagcgattgttgtatcttcagtttcacctgaacgatgagaaacgacagctgtgtaaccagcttctttagccatttcgattgcttctaatgattctgttaaagtaccgatttggttaactttaacaaggattgagttagcagcgcccatcttgatacccttacgtaggtaatcagtgtttgtaacgaagaagtcatcaccaacaagttgtactttttcgccaagtactttagtgattgatgcccagtcttcccagttgttttcatcgataggatcttcgattgaaatgattgggtatttagcaactaagccttcaaggtatttaacgaattcagcagttgtgaattcttcaccagttgaccaacgtaatttgtaagtcttatcttcattgttccataattctgaagaagcaacatcgatagcgattgagatatcttcgccaggtttgtaaccagctttttcgatagctttgatcaagtattgtaaaggttcttcgttgttagcgaaatcaggtgcaaaaccaccttcatcaccaactgaagtaactttaccgtcagcagataataggctcttcaatgcttggaaagtttctgaacccatacggatagcttcgcgtacagatttagcaccaacaggcatgatcatgaattcttggaaatccactttgttgtctgaatgagcaccaccattgataacgttcatcataggcgttggtaaaacatgggcatttggtccacctaaatattcgtacaatggtaaacctaattcatcagcagcagcacgagcaacagcaagtgaaatacctaagattgcgttagcgcctaatttgcctttgttttcagtaccatctaattcgatcattgtttgatcgataccgcgttggtctgtaacatcaaagcccatgatttctttagcaagaatgtcgttaacgttagcaacggcttttaaaacacctttgccaccaaaacgagatttgtcgccatcacgtaattcaacggcttcatgttcaccagttgaagcacctgaaggaacgattgcgcgaccaaagccgccttcttcagtgtaaacttcaacttcgacagtaggattgccacgtgaatctaaaacttcgcggcctaaaatatcagtaataattgacatgtaattttctccttttcggctaatcgtctgattagcgcttgtttgatgtcggacaaagcccacatctctattttagccaatttttagccattcgtaaataagaattcgctaaaaattagtcgttaaaatgaactaattctaagaatgaagctgggtccatacttgcgccgccaactaagccaccatcgatatcgtctttacccatgatttctttaacgttagcaggtttaactgaaccaccgtattggatacgaactttgtcagcaactgtctggtcgtataacttagcaactgtttgacgaacaacagcacagatttcttgtgcttggtcagcagaagcagttttaccagtaccgattgcccagattggttcgtaagcaataaccattgagctaacttggtcagctgaaaggcctttaagaccttcagtaacttggttagaaacccatgcttcagctttgccagcttcgcgagtttctaaagtttcgccacaacagaaaattggtgttaaaccattattgaagatagcgtgtgcttttttgttaatatcttcatcagtttcgtggaaatattcgcgacgttctgaatggccgataataacgtaatcaacacccatttcagcaagtgtctttggtgatgtttcaccagtgaaggcaccgttgtcttcaaagtaacaattttctgcagcaactttcaagtcagttccctttgctgctgctaataaagcaggtaggtcaacggcaggtgcaccgattactgattcagtttgagcaattttaggtaagttggctttgatggcattaacgaactcagttgtttgagtagggttcatgttcattttccagttaccagcaatgattggtttacgcatgagaaaatctcctctaattttgaattatttgtctgaaatagcagcgataccaggtaatgtcttaccttctaggtattcaagtgatgcgccaccaccggtagaaatatgtgttaacttgtcgccaacgcctaatttcttaacggctgcagttgaatcgccaccaccgacgattgttgtcgcgcctgataagttacctaagaattcgccaattgccaatgtcccattagcaaatttttccatttcgaacacacccattgggccgttccaaacgactgtcttagcatctttaagaacatctttaaagtcagcaattgctttaggtccgatatctaatgccatgtagccatcaggaatgttaccttcaacagtttctgtcttagcgtcgttagcaaacttgtcagcaacaatgttgtcaacaggcaatactaatttgtcgccagctttttcgattaattctttagctaattcaactttgtcagcttcaactaatgagttaccgattgataaacctttagcagcgtagaatgtataagtcatcccaccaccaacgattactttatcagcttttgctaataaatgttcgataacgccgatcttatcagaaacctttgcgccacctaagatagcaacaaaaggacgttttggtgtatcaacagcttcgcccaagaatttgatttctttttctaataagtaaccagcaacagcgggtttgttgtttgctttcattgcttcagcaataccaacgtttgaagcatgggcacgatgagcagtcccaaaagcatcgttgacgaacatgtcgcctaatgaagcccagtattcgcccaacttaggatcgtttttactttcgcgtttgccaaagtcgttatcgatgtcttggaaacgagtgttttccattactaagatatcaccgtcaaccatagcgttgatagcagtttctagttctgaaccttcgtttgaagcaacgaatttaacgtctttgtttaataattcacctaaacgtttagcaactggtgcaagtgttaattctttcttatcagcatcgctcttaatacgacctaaatgtgatagtaagattaacttgccacctttttcgtttaaatattgaattgttggtaaagcagcagcaatccggttatcgtcgccaataacgccacctttaatagggacattaaagtcaacacgcattaatacttttttaccttgaacatcttttaagtcttcgattgtttgtttagccattgaacaagacctcctaaattttcataaaaaaaggcaggaggagtttaccccctcccgccttattaattgcgatagtaatcagtgttcactaaaagtgaattagattaatttagcaaatttttctaatgtacggatcatttgagcagtaaaacctgattcgttgtcataccaagcaacagctttaacaacttgtcctgaaccttcaccaacaacttgtgtttgtgtaggatcaaatactgaaccaaattcagtaccgatgatatctgaagaaacgatttcgtcagcgttgtaaccaaatgatgcgttaccttctgtaactttcttaacggcagcgttaagttcgtcagcagtaacattcttttctaatgttacaactaattctgttaatgaaccagtgataactggtacacgttgtgcatggccatctaatttacccttcaaagcaggaacaactaagccaagagctttagcagcaccagttgaatgagggatgatgttagcagcagcagcgcgtgcagcacgtacgtttccaccacgatcaggaccatcttgtaatttttgagtagcagtataagcatgaactgttgtcatagtaccagctttgatgccgaaagcatcattaacagctttagctaaaggtgctaaacagttagtagtacatgatgctgcagaaatgatgttatcttcagctgtgatagtgtcatcattaacaccgtaaacaactgtcttcatttggccagcaggagctgagataagaacttttttagcaccagcattaagatgagcttgtgctttttctgctgatgtgtagaaaccagtactttcaagtactaagtctacgccgtcatttttaacccaagagatattgttagcatctgcttcagcataaactggaatgtttttgccgtcgataaccaagctgttttctgttgctgatacttcatggttaaattgaccatgagctgtatcatattttaataaatgagctaacatgtctggtgatgttaaatcattgattgcaacaacttccaagtcagtgttgcttaattcataaatacgacgtaatgctaaacgaccaatacgtccgaaaccattaatacctacttttgtagtcataataaagatttcctcctctaggaaataaaaatttattttaaagggtcgccccttgtaaaatcatgttagcagcaccctcatccgtgattaaccacgtctgtttaggtgcgagatgcatgtatgccttaatcgccattgctttggattgaccaccagcaaccgctaagacacacggaatttttaataagtcgcgaatctgtaatccgattcgcggaatcttatacaccacttcaccgtgctcgttaaagaaataaccaaatgcttcaccaaccgcccgacgttctttcaacatcgcaatggtgtcagctgacatgtctcgtcgttccgccatcgtaacggcttcaccgatactgtgcaaaacgccacgactacgttcaattaattgtaacacttcttgaacgcttggttcctctaacagtggggcataagtcttctcactcacctgttcagggacatacaatgctcggtgtttaccaccagttcgtttggccatttcagcacaaaccgcatttgcctgaatatcaacactttcaccaataccaccccgagccggcacaaaaattaaattacgctctttcgataaatcagttgaaagttcttgagccgccttcgccatcgtcgtcccacccattaccgccacaacactttgaccttgtggtaataacaactgcaacgtactattaacgaatttgcccatttcggtaaggactttgggttgttcatcactgttaccagaaacaatcaagcaatgttcgattcccaacacccgactcaactcacgttcagtttggcgtaaacctaagaattgatccataacctgtcttaattgttccagagtctcactaccctttacggttaaaaccatacctgatttcgacgaatttagcaaaccttgtgcttttaaaaaatccgtctcggtccggatgacgcgttcactcatttgtaattgcaaagcaagtgttcgtcgtccaactggtgctgcccaatcgatatgttgtaaaacctggtagcgtttcttaatgatttcaacgaaatcgggcgcaacagcctctattgcagataactcatcgcgcattgctaacgcctactttctagtgggacgtaatatgtccgtctatgtcattaagcgacccattgttggcaaaaataaaaaggaaacctactaaaactagcaactcacctttcgaacaagactattataacaactgtataaaataagtgcaacgctttgaaaccaatgaatacgttttctttccgaatgtttttttaaagactgatttatcacgctttttattaaattagacttgatattgtggctaacttccgctaaaataacatattgtactgttaagtacgtttgattagacatttgcgccgctagtgtaatggatagcacccaagattccggttcttgagatccgggttcgactcccgggtggcgcatagatagccattgataagtcgttatgggaatgcttaggcattgttataacggcttttttgtttctctaaatatgattataaatcactattattgaaaaaaagacattcaaatagacattcaacaaaaataaacgcacggggcatatacataacttacaacagacggtcatattaatggccgtcttttaatttgggctagtgctcatgctaagtcattaaattagatcattcaacgacctagattaaacataggccatagcaactaccagttttttatgtcataaattgcaactgtatttattaaataggtctgtccaattttggacatccctttttagcctaacaggacgatacgttatagtagcttgtttcatatccgccaagttgtcgggtatagaaaatccatcacatacaccaccgccctgattcagggcacaggttctaaactaccatttcggtaccccaggttaagacctcccatctccccaaaaatgggggcatctagtattaactcggccgaaaattcggccctactcaaaatggttgattcaaatagtctgcgaaaaattgtgcaacctcatttagagattttagagcccctaaagatacaacggaaaattccatgctactcaaaacatttgatacaaacgcttttctccaatttcggagaaagtccaaaaaaactggtgtcatctgctcaaaattgagccaatctattaactttccaacattttccaacattttccaacattctttagggtgtcagaaatgtcaggatactcaactgaacaagggtttacagataatatattggatgtgttgcagattgcaaatattgcttcattactggagaaaacttacgacaatgtgagcagtcactgaaaccaataaacacaataaacctatcattattaaccatctttttcaaatactgttcaatagtaattggtttagcatcagctatattttcttcatattgcgactcactaatatccgttgtctgtactgccgtaactgctgaggtactagtagctgctactttttgaactgaagtaaacgaaaaaccggtaaatactaagatcaataataatgcaatactttttttcatagtcatttcctctttttaattaatttaattaacgtaccgacggcgaagggcctcgtttgtctatttttcttaatataatgatcatctaaaaaccctagtaaagttttaaactttcaatttcgtttaggtatttcttcaaaaatactataaaactgagatttatcggaaaaatcagccatacataaaccatttaaaccagccttctgaccaattacacttaattcaataagcaacttctcttggtcagttgggaaataaacctgacctgtactagctacaactcgaatataattaactaatcgattcactaacgcttctggatttttaacctcatctatttttttgtagacttgtagaagcacgtccgtaatatctagaagctctgatgattgattatcacggtttaacaaaagaccatacaattccttgacatagcatttcgtcttatttctaatatctttttccttattgtttttcatttatataatccccctcctgcaaccaccatttaaaaataagaaagcagacattacaataatgtctgctttcttattaatcaattagcaagaaccgtgtccaccattgctaacatgattgacgccacaagtccaagcctgcccccagttcactttacaaccactcttagtacaagaaacaccattaccatagtatgtcccgccttttaccttggtcaattcttccatgcttaaagttttaatatttttcatcatccaacattcctttctatattccaataactaatattcgggattaacaagttgagctcgacttctcttccttatctataagtataagtattaagctttcacttgacgcattttaatattatcgttcaaaaatcaaccataaccgttaaaaattccgtattttctgattttcttttattagtcattcaattttagcagcttgaatcacatattaactaaattaacacccaaagaattaggcacaaaaaaggcaagcctcgtatgaaatacgccgacttgccataaaatattgttgtttaattttttaaacccacttgaatcagcggggctctttttacttatttagttgtcttaaccgttctgcgactggttaaaccgtaccctaacgcgcaaagtccgtaaaataatgtgattgctacaatgccgcgcatctgtaacgccacgccgccgaggattccggtaaagacccatagtggccaattagcaaccatgaagacaaacgctctaaaataccatttcgcccacttttgactccgcattttttgatccatatagttcgcaaaaatcatcattaagcaccccaaatactgactattcacagttaaagtaaccgctttctatacttctaaaatacgcttttgacgaatgagtgtcaattaaaaaccagcaacttaacgactaaaaaaatcggctagtcccactgcttacttgaagcgagtgattagccgatttttttaatgagattaatgcgcttgtgaaccaattcccacaccttcgcgatactcagagggggtcatgccggtttgttgtttaaaaattttatagaaataaccttgattctgataacccacaaaagaagcgatataattcacgtcaagatgcgaactgtgtaacatctctaatgcgatattaatccgataatcgttgagatatttagaaaaactccgccccgtatcctgtttaaagagttgccctaaataaaccgcattcagatgcaactcgccagcaacagaacttaatgatagtggttcggcatagcgttgctcaataatccgacacatcgccatcacgttagtggtgaaatgatatttaacggtttgaccagcttcttggtagatatcaataataatcttaataatctcggagacgacatttgcattattaatttccgtaatagcgcgcgttttggtatcgactgttgctaatttttcattcagtactaacaacacgactaatgcaaattgacggactaatacatcggaagcattcgctaacttcaaccgttctacgcgttcactaaaccactttctaaaatcagcaatcgtcaacccgctaatcgcctttttaacctgcgaataacctggtaacatgataacgacctctgttgaattggcatccgctaagcgctgtagtcccgcagctgattcaaagaagtattgccgcgatatttctaactttaatttttgatattgagcgactaactcaactaacgaagatgctacgactccgataatcatcggacgatgcacgacactaacttgcgttggcatttgatcaatgaattgtttaagggcgacttcatccccttgaaaaataataatgtaatcacgtgattctaagaaaaagccgtggaccgctggcaccgtctgtaaataaatcaataatgcactaggtggaacggggtttaaaatcccgattagccgaatcgattgttgaccaaatgccaaccctaactcctggacaagattgacgccggtttcaacggccgtattttgaagcaacgttctagcctgggcctgaacggcaaatcccgcaatttgttggcgcatcttttgttcttcaatatgctcaattgcttcttgtagtgcttcgatcagttcttcggtatcaatcggtttctttaaataattgacagccccttgttgcaagccggccttaacgtaatcaaaattggaatagcccgaaataaccagtaattccatctccggtctgattttcttagccgctgtgacaaacgtcgggccatccatttccggcatattcatatctgatattaaaatatcgattggtgtggtttgtaatatttctaatgcaaccaacggatttttttccgttacagcgacttcgagtcctaaaagttgccaatcaattattttacgataaccacgtaacaacatatattcatcatcaacaatcatcactttaagcattttagcatcatccctctacgttagtgaaatgcatcgctactttaacgcaaccgtcattttcaatcccaatcgtcatatcaaaagaatcaccaaaataggctttcattcgtaaataaacgttttgtaacccaattgacgttcgtttctcaacattattggattcacgcatctcgcgattaatcttggcaacttgattcacagttaatgttttaccgttattaatcacaaccacattcacttgagttcccacttgccagactttaatactcaacgcattattaagccgagtgaaatcaacgccatgaacgaaataattctcgacgatcggctgaagactaaatttaggtaatttaatatcggcaacatcggcagcaatcttaatctgataagccaatcgatctgggaaacgcacctgatatagataaatatacttctcaacaaatgataattcttctttcaatgttgcttgtgccgaaaaatcggtattattgcgcaacaacgctgcgaaactgtagaccactttagccaattcaggttgattagcatcgagcgccgccatccgaatatattctagcgtattcgacataaaatgcggattaatctgcgcttgtaaggcacgcatattcgattcttgattggaaatccgcagttgatagatggtataaacgtactcatgaatttcttcaagcatattattgataccttcagctaatacttttaaatcagtttgttcggacaccacttcaacccgggtcgataaatcgcccgcaccaaaatgactcaccgtatcaacaatttttttcaattgtctttgataccgtctgaaaataaagtgtaacccgctactcaagataatcaagaataacaaaccacccatcatgagcggtaatattcgcttaaatatcatctgttttacccgatgctgattggtgaccatcataacggtgtaaccggagggtaatgatttttgggcaacttgataatcttttaattgattaatttgatcccgcgtaatagcctttttagcccttttttgctcttgcttcgagaccgattgacccgcgtagtagaataccgatttattctgggtcgtttgcatgaaaagctgcatcggacgaaccgtcttaatctgatccaactgtttacgtaaatcttgagaattataagtaatgcttaatgtcccgtccgtacttaacgtatattgattgattaatggcaccgtgattgcgaacggatcttgttcgttattggttcgtttagtgctaatttggccacctggttttgccggtgtcgctataaaaactgatttttgattagccaactgcaattttaattttgaaacctgtggatgcatcatcaagaaaagtcgcgattcattcggccaaaagaaataattacccgaactaatcgtccgatcggttgcgtagtcactgtagtccatcaatgaatgtgaaaaatattgattgagattttcaatcgtttccggattagcgaccaattgattagcaaattgttgtgtggtctgtagattctgtgaaacgctattcgataattcagtcgtaatcgttgattcagcctgtaacacttcagaattatagttacggatattggaccaaatcaaaaaggccgtcattagaacaactgtgactgttagcacgcctgtatacaaattaatcaaccaaataaaactagatttcattaaggccaccgtctttctggatgattaatttagtgggccaataaccggtcaatcttttgataccaacgtcgtgaaaaccagtttgctaagaccacataggtccccggtgtgaagaatagaatcaaccctggccatttaaccgaagccccgacaatcacaaccgtaacaccaataaaaaataacagttggtaaaaactgctgaaaaattgcgcgattgctaacttgatagcatctttgaagcccacatcataatgggttcggattaaaagtgtgaaaatactaacacagaaagttaacgctaaagcgaaaataataataaactgaatcatcaacatccagccataattcaacttagtactgagcatcaaattataaatcaacactaacataatccctagaaagacccaggcgtttcgattcactcgccagaaatcctttttgaatagttgccacccttttttaaattgataattttgggaatgccactgattatccataaataactcggtaatcgtgtgaaaagccggaccaatgccaaagataaccagcccacacagtacataaaaccaaaaataaatggtcatcaaaaaaataacataaactttcgtaaaaacactttgcgttgcctgtccaatcatcgctctatctccctattggcacgccctgaatgaatgcgctaccactattaagtttaacaatttattcttaattgtcaaatagtttacacttactaattgatagtaatttataaaataaaaatactcagaccagattgatccgagtatcttgacgctctaaattatttacctgctaagaaatcatcatattgtgattgtaattctttttgaaccttatcgtaaccagctgtcttaagttccttatccatcttcttgatggttggcgctggatcagctgtcccggtattcaaaatatctagatacttactcatcacattcgagatattagtcacttcagttttaaccatcgttgtatctgggttaaagccaagtgcggctgattgtttagcatctttaatcttatctttacgtgtttgaatcatgctatcagtcactgaatcttgcgtatataggttatcattattacccatcatccatgcaccaataaagtaatttggtttatatttgtcagtaatcttgattttccctttttccttatcagtgaaattccattgttgcccttcaagaccccaagtaatgttgtttaataacgtcttatcagtgttcaataaattcaagactttaacagcggcttctttatgttttgatgttttagaaacagtccagattgcaacttgtgattgtgctgaagatttgtatggatctgtaattgctttagaggttaatttcttaccaccggcattgttagataacactgtatcgccataatcgtaaggaccttgtgtttcttgacgaacgagccaagtgttgtcttgtaagttatattgcgtgcttgaagtggcagcatcttgtggaatataacctttcaaataataactgtgtaaggttgctaagatgccttgcatttcgtcagtatcataggcgttgacaattttcttgtccttaccacttgaatcaattgcaaatggcaaaccgttccccaatgggaagtccatatgagctggtgaagctttataaccttggccgattgcaaaagctgcgacaccagggtttgctttatggaatttagctaaagctggttccatgctagcataagaatcaacattgctaatatctaaattgtttttatcaactaattcttggttaaaagtcaatgtattttgagcaaaaacgttggcgttaactgggaaaccataaatctttttgttaacttttaaacctttccaataagctggatcgacgctgtcataagacttcttagcgtctttcttaatgagactagtcaagtccgcgtaagcccccttagcggcattagctggatagctttgtgcaaaggctaaatcgtagtcatccccagaagtcaccatgacgttatatttctgttcataatcaccccagccaataaagttcattttaagatcaatatctttataggtcttatgaatttgcttattagccttgctgataatttgagcataatttttaggcttgtcccctggcatatacatcgatactgttgtcttgccattatcttcagcactatcacttgatttaccacaggctgctaaaactgtcgcgctaagcgcaaccattccgagcattgttatatttcgaacccactttttcattgtaactcctcctttttatatcacactatcaactacgacacttaccctttaacacccccaatagtcatccctttaacaaagtatttctggaagaatggataggttaaggcaattggtaaggtcgccacaacaacgactgcaaaacgcatcccttcggcgggtacattttgggcaagcattgctgagcccccactgttcatctgctgagtcatcacttggatgttattttgaatcttaactaataagtattgcaatggcactaatttatcatccgtaatgtacagcaaagcattcatccaatcgttccagtaacctaatgatgtaaagagactgatggttgcaatccctggaattgccaaaggtacgacgatacttctgaaaattctaagttcagaagccccatcaatccgggccgattcaataatcgcttctggaattgatgttttgaaaaacgaccgcatgattaaaacgttgtaaaccccaaagctcatcggcaaaattaaagcccaaatattgtcctttaaccctaacatttgagtgatgaccaagtaagttgggaccattccgggaacaaataacatcgaaatcagtgcaaagatcgtaaagaacttggcataagcgaaatctttccgagaaatggcataagcataggttgatgagaataaactgttgataatcgtcccaacaacggtgataaagaccgtgacgcctaatgacgttaaaacttgtttgcccatcttggcgaggtaaacataactcattgttccccaatgtttcggccaaaattgatagccatatagcgtaatatcagattctttcgttaaagaaaggatgatgataaaaacaaacggtaagatacaacttagtgcaaaaattgctaagaagatattgaaaaataaattggtgccgctactaaattttcgaatttcaacggctgaaatacgtttctttttacgcatcgttgacgcctcctaaaacagtgcagattctggatgtttccgtcgaacgacccagtttgataaaacgattaacaaagcgccaacaaccgattgcattaacccggctgcagttgacatcccaatatcgttagaagttgtcaaagcccggtaaatatacgtatcaaacgtttgtgtgacattaatcaacgcccctgaatttcgcggtattaaataaaacagaccaaagtcactgtggaaaatcccaccgatatttaaaattaacatcaaagttgcaatcggtagaatatgcggtaacgtcacattcttaatctgttgccacttactagcgccatcaatcattgcagcgtcatagtaagatggatcaatccccatcgcagtggcgaagtatagaatactgttataaccaatccctttccaaacgcctaagaagataataatgactggccaaacccacggcgaattatagaaatcaatcggctgcccgccaaaggactgaatcatgtgattcaagatccctttatcactacttaggaaggcataaacaaagtaagatagaattgcccaagataagaaatatgggaaaagcatcatcgtttgataagtcttcaataaccgttgattacgtaattgactcatcacaaccccaaagaagattgcaaagaagaaattcaatagtaagaaggtcatactataaccaaccgtgtttcgtaatacgagccagaaatcggctgatttaaagaagaatttaaagttatcaaagcccacccatgggctgtgcaacacactataaataaatccttgatctgaatattggaaattctgaaatgcgacaacgttcgcaaatactggtatatagaagaaaacgattaaaaatagcgtccctggtgcaactaacattaaaaagactcggttatcccacatggtttggaagaactttttcttttttctaggtatcattggtgtctcggttgctttttgtgccatcgtttcttccccctttctttaagtcacttattattgtaaccgctttccgataatctaacaatctacaaatttaatgattttatctataaattcaagatttacttaacttttttgatgccttaaaacgaaatatcacctgcactgacaatttcttgataaagagcatgaccaactaagccattactttttttatccatttgtaaaacgggcgcttgtaattccagtaacgcatcccgacctgcttgccattcagtaatccgccagattacagtatccgcacgggtcatctgggcccctaaccgtaaatcaatcacttcatacccgttaccacggcgttgttgatgccagatttgccgtgatactttgcttaattgtcgcaaagcttgttggaacagtttgatttgttcaatcgccatggtccccgcctgaataccgccagtacgtagtccagtaacggcttttaacgcattggtcttggcgattaaagtttgtgccaaaatttgatagtactgtgcgtttagttgattggccgcagttaacttagctgcccccattttggccgctaaagcctgccattggtcaacgaggtcaattgattttaaattgaattcatagcgttgcaacaataaatcctcgtaaagcacaattttgctgacattatcactatcgacattgataccacccgtaaaattatcaaattgctctaagtctttgtaaaaaaccggggattcattgtgaattaattcaaaatcttgatcaatcgtggcttgcgtcacatcgtcgtgatattgataggccgcaaatgcttgcaaaccgtaccaagctgcactaatgggtacttctgccccatcgtcaaaccacatggtcacaatcacttgtctaacgtttgcttttttagctgctgacaatccggcttcgaccgttgctaacatcttactttgattaggcgctaactcactccaggtccaaatgccacccgcaaaaaccacgttatcgctcaattcaaaatgttgcttaaaccgatcaagataggtggcttggtcttcatgataataatcccaataaacttggccgaccttgggtaattgcgctttaaattccggtgagaaatgaacatcgggatcatacatttcatgttttggtgacgcaaaagtgaaccataaatcactccacatatacggatccaatcctaatgattcggtcacctcaacaaccattttaagttgatttaaaattaacgtttgttgatctgtaaaaccattttgatctagatagcccccacgacctaattgataggcttcgtccatcccaatatgaatcttattggttaaaaatggggccgttgcggcttgtaacaaatgttggataaacgttttagtcgccggtgcatccactaataacgtatcgttagtatcccgaacggcatgatgagcatcccactttagggcattatgcatatgtgctagcgtttgaatcgccggcacaactgtcacgccaaactgttcaccgtagacggccaccgtgtgtaaatcagcttgtgaatagcgaccgcggccctgaccgaaataaggttcttctggtacttcgaataaatcttccaagtacaaccagagttcggtgtaacccatactggcaattttacgaatataagttttaagcatctcgaccgttggcaccccattacgagcaacgtccaacatcgcgattaaactatcaaaatgcgtggcctgtttgatctcgaaatcatgctcctctttaaccaacccactatagagtgcaacagcgtgcatcaaatccgattgagtcccaaagataatggtcccggtatttcccgttctcgttaaacaaatccctggtgccccttgctgacaatcgacggtcaattgttgtgcatcaccgttatcgctgattaacgcctccgctgctagccgttgttcagttgttaatccttgtagtttaatcatttaattgcctccctgaattaatcacgtctaaatgatagcgttttccagaaaggataaacagtcataaactatagtaatttatctataaattatagattgctgatttaaccaaaaaaggcgtgtgatattagtctcagtatcctgatgttaaacgaacattattcgttgacgcacgtcaaaactcatcaatcttcgttcaaatcaaaaaatccagttatctttagttcggataaccggatttttaaacttgataggcaattgataacgtgcttttgagttgctacccgcaactcaacacacttacagctgtgccactaaactactaaagaagtcagtcaattcggggcgctttttcgtattaataaaattgataatcttaacgggctcattttgatgtccgcagataaaatcataaatttgtcgtttcaattcatattcaatctgcatcagttgtaacgcttgttcagtttgttgaaccaaattaagggccggtgagacgccttcttgcgtgattgcaaaaatcgttcggttatcaatctgcaatttcggcccgtcaagcatcgccatcttaaaggttcgtgttgacggcacaatctgctttggatcgaccacggtgaccgccaaatgaccagcttgcgtcaatttaaaggtggttgtcgcgatttggtcgccgaggtgttcatacatgacgtattcatgatcagcacacccgaaaatgttcacgacaatcgcttccggtaatgtcgtcaagttctggtgggccgattcagtcatcggaataatcccaccttgtttcaccaagaccgggtattgtcccaatggccgatacaaattaatttcacgttcacccgcatatttctggtgggtaaagaaatcataccaagtgccttctggtagccacgtggtcgctttactttgttgcaattgcggctcgcatttattgacgatcgccgacaccaacaattcactcccaaagaaatattcatcccgataatcataataagtgtccatctctggatattgataataaatcggttggactaatggcaccccatcgaggttggttttaatattttcactgtctaggtacggaattaattgatgccgtaatcggagaaaagtatccatgatttgtcgattttcaacgggataacgccaaggttccttccccgaaaatggattatcagaactatgcagccgattaattgggctgaagaccccgtattgaagccaacgggtctgtaactccggatcataactaccaatcatgtgtccgccgatatcgtgactccaccaagaataaccaatattgctagccgtcgccgtaaagtacggttgaaacttcagtgattcccagctaatccaagtatcccccgaaaagcctagtggataacgttgactgccgggacctgcataccgcgataaaatcagcgcattgccgtcattccgtttttgattatccaaataatggtaatgatttaacgcttttaaaacattaaaaccatcattattaaaataccgatcttgctgccaatcaatccaccagaaatcgaccccttcatcttctaacggatgatgcacatcttcaaaataagcccgtcggaaagcgggattttgcaaatcaaagaccgccggttccttcgtttcagcatcaagcgctaaatgttgcgcaactgccggatagtttttttcaaacgaccgaatccccgctgccggatgaacgttcaaagtcaccttcatgcctttttgatgtaaccaggctaataattgttgatgttttggaaataacgcttgattccaggtataacccgtccaaccgctaccttcgctgattgggatatcggtttgatgccaatccatatcaatcacggctaccgaaaatggcactttttcttgatcaaatcgggtgaataacgcttggtattccgcttgagtgtacgcataataacgactccaccaattgcctaatgcatagcggggtaaaatgggcggcacccctgacaatttaaaatagtctttaatcgattgcaaatattgatggccgtacgcaaagtaatataaatccgtttgatcacgattttgtggccctaattcttgattttctaaaatcacattgttatcagcgtcgtcaatcaatgcataaccgtgacgcgaaacaatcccttctgccaacgggatttcaccatccgcttcatctaacgtttgtgcggtcccaaataaattcccgccgattaattcacggccaaataaccaacgactaaaatacggttcatagccatatttggcatcaatccataatgttttatctgaaaacgggccgccttcataatataaatgaaacccatctgtttcaatttctaattcatgttcttgacggtgccaatgcacctgaacggtagtgggtgtcgcaaaattacggtcctgcgcaaaataagtttgccgggtttcaaattgaccatccactgcccattcaatccgcatgagatagtccgtcataacggtaaatcgataattttccccttcaataaccttggctggcatccatttatcctccatcataaaaaatcaatcattgttatcaatcaatcttcaacattgcgtattgagattggtagagatgataatattggccccgggtttgcattaattcttgatgattaccgtgttccgcaatctgaccaccgttgacataaaatatttgatcactatttttaatcgtggataagcgatgcgccacaataaatgatgtccgattcttcaagagcgcatgtaatccggcttgtaataattcctcggtttcagtgtcaatactcgacgttgcttcatccagaattaatattttcggatcagccagcaagacccgcgcgaaggcaatcaattgtcgttgacccgcagataacgtgttgcctcgttcttcaacctgcgtttgatagccatctttcaaatgacgaataaagtcatccgcatggaccacttgcgccgctgcaacaatttcagcttcggtggcgtctagcttaccgtaccgaatattatctaaaatggtgcctgaaaaaataaacgaatcttggagcatcacgcccatctgccgccgtaaagacgctaacgtcacgtcacgaacatcatgcccatcaattaagacagccccttcgttcacgtcatagaaccgactcaataaattgatgactgtcgttttccccgcacccgttggtccaaccaaggcaatcgattggccggcttgcaccttaaaattaacctttttgagaatatccttgcccggttcataccggaaagtcacgttgttaaaaaagacatcaccaacaatcgctggtaattcttgcgcatcaggtgcatcttcaatctccactggttcatccaaggtttcgaagatccgttccaaataggccgttgcggtaatcaacgaattataaaagttcccgatattaatcactgggttccaaaaattattgatgtaaccaataaacgcaattaacgtcccggtactaacgttgacaccaatctgacgaatgccgacaaaataaatcaaacacgtagtgattaccgcgatattttgaacccccggccataacagaaattgaattttgaccgcgtgcatccacgattgactattttcagtattaatcgcgttaaaaattctaaaattttcatcttctctggcaaaagattgggtgactttaatccccgtaatactttcgtggatataagcattcaaattggattgcttattactgagaatctggtaagctttccgttgtcgcttttgaacgtacaacactaaaatcactagaatcggaattaacgataaactataccaagttaagcggctattaatcgcaaacataaagaccaaggtaatcagaacattaaagacatccgaaattaaattgactaagccatcgcttaacaaatcacttaacgtattgatgtaattgaccactcggattaaaattttaccgtggggccgattatcaaaatatgaaaatgataatttttgtagatgttgaaaaatatctaagcgcatatctttcagcatatcttgaccgacttcggtaatgtgataaattcggtaacggatacaccagcccattaagaataacgaaatcgtgtataacccaccgattaataataattgtgagatattacgattcgggatgacctcatcgataaccaccttggtgaaataaggccctaacatcccagcaatattggccaacacaatcacgcttaaaataatgtagattttctttaaatacggtttaatatattgggctaaccgcacataaccatgccaattaaattgttcaacttgggcctcatcgacatttgacttatttcgtttgaccaatttgctcccccttttccaaacctaattgtttttgaaagacatcgtaatagcgcccttgttgttgcattaaaacttcgtgcttacccgcttcaacaattcgccctttttccaataacagaatcaaatccgcatcacgcacggaagaaatccgattggcaatgataaacgtcgtcttcttagtcgttaagccggctaattcatgttgaatcttagtttcagtctccatatcaaccgccgaagtcgtatcatctaacatgagaatcgccggatctttggcaagtgctctggccaacgaaatccgttgcttctggccaccagataacccgacgccacgttcaccaacgatggtttcgtacccctccggcatccgttcgataaaaccgtccgcatccgccacacgtgccacggattgaatataaccggtatctaaattaggccggccaaaggaaatgttttccgtaattgaattcgagaacaaaaagacatcttgcatgaccatcgatatattatccctcaattggcgaattggatattgacgcacatcttgcccgtcaatcagaacttgcccagaagacggatcgtagaatcggcttattaagttaattaaagttgttttcccggaacccgtctcgccaatgattccaatcgtctgcccggctttcgcactaaacgacacatcggttaagatattatgctcaggatcgtcttggaaatgaaaagtcacattcttaaacgtcacatcacccttgatgcgcaacggttcttcagttgtttcaacttcgatttcaggtttcgtcgctaacatttgccgaattttgacacacgaagctgaaaaacgttcgatatcattaatcaaccaaccactcatccgcatcggttgattcagcatccataaataaccgttaaagacgaccaaatcacctagcgtcattttattttgaataactaaatagcccccaaaaattaacgcaatcacgtttaaactattcgcaatcccatcttgccaaggtaaatacgttttagagacgttcgccgcagctaaattgcgttgtttataatcgtcgttatgttcattaaacttgctgatttcaaaatcttcacgaacaaatgctttaacaatccggttaccactaatattttcttcgaccatcgaattcagtcgcgaaaaactttgccgaatcgcaaagaacattgggtgttgtgccttggccattgcttgggttaaccaaaatataatcggcgtaaccgctaccaatgctaaagtcagttgccaactgatcgttaacataatcaggattgatacaataaaataaaagacacattccaaaacttgatagctgacccatgaaataaaatggcgaatcgcatcggtatcgcccgtcattcgcgtcattatatcgccaacccgattatggttaaaaaagtcgaaatccaattcgtgtaatttatcatacatatccattcgtaaatcaaataacgagttctgccccgtttgttcaaataatatctgataaatataccgtgtaatggtccgagcaacggtcaccccaatcatcaccagtaataatggcaccaataatgaatcttcgtgtccatcaatcacgcgatcgacaatttggcccatcacatatgggttaactagaattaaagcggtactaattagaaagaaaatcatggcaattattaatttatagcgatttttaaccacatattgccaaatccattgaaaattattcattttaaatcccccgatcttcaatgccttattatcgttgttttatttgaaaataacatggtgaattaacctaaaaataatgtacaatatcattattaagaaagcgatttatttggaggtctacaatgagttatactgatgccaaaacatttaatcccgaaatactatatgcctttgatccttggaatcgcaacaccagtgttcatcccaaacacgcccacgatttcctagaaatcagtatcttattagaaggccaatcacattactatattgacggtcaatggcaagacgtcgttgcgggccaaatcctggtctttaacccaggcgtccaacacgctgaacgccaaaaacacgataccttttcccatcaacttcacatcggcattcaaaatattgccttgcacggcttgccacgtaactacttacccaaccaaaatacccaactgtcgattggcgaacaccaatacaaagtgattgatcaagcttggcgcttagtctccgaaatcaatgagcaagccagtgattatcgcttaattagcaagggcatcattactgaaattctggtttatattctccgcggattagcccaacaacaagcggtctcaactaaaccctttatttcgcgtaccgaaaaaaaacaaagtcaactcgtcgcagacgtcacttattttttagagaatcactacaccgaagatatcagcttggaccaactggctcgagacaattacgtcagcacaacttacttgtccaagacgtttaaagaagccacgaaaatgagtcccattaattatttaatccagctgcgcttaaccaacgcgcgtgaactcttaaaggatgaaagctcggcaattaccgtcaaacaagtcgcagccaccgttggctatagtgatgcctatcattttagtaaactctttaaaaaatattatggcctctcgccttcgcaaatctctaaagaataaactgacactttatttattggctagtttcaacaaaaaaatcccgtcctcgttgttcaatgaaatgattactttcatttgatgacgatggcgggattttcatattaaactaattcataatcagatgacataacgtcaaatcataattgttccgtaaatcaaaacccgttaacttatagaatttatcaatccgataaactagcgtatttcgatggataaataaagcctttgccgcttggctcaacttcccatggtatttaaagaacgtattaatcatctgcaaggtttcactatcagttggtaaactcgtctttaacgcttcaattaagggcgtgtataaccgatcttgttgaatcaaagactgaaacagactaggggcaagcgtattgacactcgaccgttgcacctgtttaaacagctgacgttccatctgaaaaagtgctggcaattcaaccgaaactggccagaaatgaccgatgtaaaataccgttttggtgtaaaataccgcatccaatgattgcaaaataccggtaaaattagtctcaaacgaatcatctgattgggtctcaattaaaatccccgtcgcttcatctaaccaaaaagcatcgattggtttcacaaaataggcttggagcgcctctaaccacgctgctttttgaccagaactgtcggtgaaggtcacctgaaactgaagaaccctaacacttgtttcacgtttcgttggcacctgctttttttgaccccacaagaacgcataccaaggccggtgttcattatcaacggtacaagctagactaagcaacaacgcctgttctgacgttgataaagtcgcctttggtattgaaagccattgatcatcaaccattaacgctaaatcagcctcatcgtgctctggtgtttgattgactttaagggttggataaatggccttcaattggttgaccgttatcattggctatccctccctatctaaaacaatcataccatattacattttttacaaaccacttgcttaacgaatcgctgtggtcgtttcgccgtcaaagaaatgcgctttatttaaatcaaaagccatcttaatcgtatcaccaggattatggaaatcacgagcatcaacggttgccacaaattcagtatcatcaactttagaatacaacattgaagttgcccctaataattctgaaacaatgacttcagaactaacaacactgttaggccaagtttgaataaaggtttcttccgcatgaatgtcttctgggcgaatccctaacgttaaatctttaccattatagcctttgctatttaacatcttagcccggccttctggtacttctaagaccaagcctttgccatctgtaatttggctatctttataatgaatatcaaagaagttcatcgcaggtgagcccataaagcccgccacaaatttattcttaggcgtatcgtaaacttcagatggtgagccgatttgttggacttcacccattgacataacaacaatccgatcagccatggtcatggcttcagtttgatcatgggtcacataaatcgtggttgtctttaatttttgatgtaatttagcaatttcagcccgcatgctaacccgcaatttggcatccaagtttgataaaggttcatccatcaagaagataggtgcatcccgcacgattgcccgacctaaagcgacccgttgccgttgtccaccggaaagatcagctggtttacgatctaaataatcggttaatcctaggacttcacctgcatatttaactttttcagcaatatcggctttatcatattttctcaatttcaaaccaaaagccatattatcaaaaactgtcatatgtggatataaggcatagttttggaaaaccatggcaatatttcgatctttaggggccacgtcgttcattaattcgccactaatttttaaatcaccttttgaaatatcttcaagtccggcaatcattcttaatgtcgtcgatttaccacatcctgagggaccaacgaatacgatgaattccttatctttaatgtgcaaatcgaaatctgatacggcataccccgcatcttcagcatttggatattgtttataaatatgatctaagtcaatttcaaccatgataaagccacccttcttaacatatttctattctaccaataaagcgcttactttaatatgacactttgaacaaaaattaacgaactcacttgtcacttttataaaaaagcttattgattcgccttaaaccgataacttctgatttcagcattctgcagtggggtctgacaatcctgcgcgattggttggctttggaaatcgattaaatcaccagttgcatcgttaacactcacctgaattgggtgcgccgtccggtccaggttatagccccgaacaaccaaatcttgattttgatcacgttcgacacccgtcacggcaaaggcctgggctgaatcttgaatcgttaaccaagtatcggcggtcggccgatttcccgtgtgccgcgtcgtcccttgcgtcaaacatgggattgcaaaagcacgggctaactgataactcgtcaaccgatcagtcgcttgttcattatggaaaattaacgcaaaactggcgtgttgggccccttggcattgggcttctggtgttaggaagtaaccccaatcacccagttcacccacacaacgtaatagagtaatggcaatcgtgttgtttttcggtaaaatttcgtattcgtttaaaccgtcattggccaccgtcacgccaccttggtcatcgtgtaaattaacaaaggcttgttgtcgttgtggattagttggattttgccaatctttttcaggttgattgggtcgtttgacaacttcaaaaattgattctgattcattttcagtggttgccaatccggttgggaataggactcgcaaacggtggtctaaggcttgattatcgtacgtgacatcaaattttaaaaccggattgtccgcttctaacgtcactaacgtatgcaattctaaatcaattaattcagaacttctggtcgcttgacgatgcgtgatatcaatgactgctcgttgttcgtaagccaattgtggcgttgcttgtttcggaatgcttagcgttgaaataatttcaatcgtggctactttttccgtatcccgtttaatttgaatgcggggtgcttggtcggtcgaataaatccgttgttgatccgctgtttctttgtagatgtattcattacccatatcaccggtatcttcgatgacggccattcgttgatacgttttttgcgtcttcttatccaagatattcaaagaaccatctactgctgaaacggccacttttaaatattgattctctaacgtatggttcgctgaaattaatgaactttggggttgatcaaaatacgtcagtgcccggtcaacttgttttaatgcaaaagtctgccatgaaaaagccgctaaatctttaacaaagacttcaacctgggcgtaaaccccgatgtacggtactctaaaccgatcagttggtaaatcggcatcaaagcgcgttgtaaaaccggtaatttcaccagtcacttcttgtccatcagcatcaatcacgacgtagtgccgtttttgttgtgcaattaattgcatcttggcaaattgggcatccggacggccgtctttaaataatgcgcgatcaagttcaacctcggctttaatcacaccactcttagagctaccacttgggttaatcactacgaatggtgtcgtttctgcagggaaaacggcggtattaatttccgcgactaaggatgcttgcgctttatcgcggatggcttcagcaatttgagagaccttctcaaaccgcgtcatcatttcacgatgcaccggatcaactgaacaacccgtaatactatcgtgaatttgattttccaataatagcttccaagcataggtcaattgcgcttgtggatattgaccgtcagtactcatcacagccgctaattgagtggcttcattaatcaattggcgttgcaccttggcattttcttgtttgagataaatccgcgaagaggcggtattagtcagtgtgtaccaaccatccgtttcttgcgacgttaattcaccgttaatcgtgctcaagtcttctggtagatcggctttaacggccgctaaataatcatctaaattagaatgaatgaattcgtaatccgggaataattcttgcgcgaccgctaaggcttgcgtgatatctttttgaacgggttggtgatcgacaccgttcatcattaacagattatcggttgacgcataacgttccacgtcggcgagtttttctaaccagtaagctttagcctcagccttttcaaccggcacttcattaccattgctgtaccagttagcgaataaaatacccaagacttggctttgatctggcccgacccaattcatttcagaataagccgattcaaaattgccatctgagacttggttattcagaccggttggtttaaccccgcgaccaaatgcaaccgcatctaagccggccaatttcaacatttgtggcgtttgacccatgttaccaaacgtatctgggaaatagccaattcccatcatgttgccgtatttttccgcagtagcccgcccaatttgaaaatctttaacgtgcgattcagggctgattagaaaatcgtcttgtaggacgtaaaaaggccccacccgtaatttacccgctgcaactgctttttcaatccgtggctgattttcaggccgcatcgctagataatcatcaataataattgcttgaccatctaattggaaactattgaactttggatcagtgtcaattaaatccaacacttcatccaataattcaactaaccgcaagcgatgtttttcaaacggcatgtaccattcacgatcccaatgactatgtgacaccacaaaaacttttttcttgcccattatgctgctcctttataagttcgtgactttattttttgacctgcatccctaaataatccattaataattcacaatacatcatgttcgcccaagagaaccattcacgtgtaaagttggccggattctcaacatcaaagccttcatgcatcattttagtccccgccgttgtagccgccaacaattctaacaagcgtaatttttcagaacgatccgcttgggttaatccttggattgataaaccaattggccaaatataattagccggtgtatgcggactgcctaaacctgaaccgtatgcgcctgcgtaaaaatagggattttcgggactcaacaacgtccgccgtgtcgctaaataggttggattatcggctttcaaatagtctaaatacggtgcgctcatcaaattcggaatattaccatcatccattaataaggcattccccaaaccatcgacttcataagcgtaaatttgctcaccggctttattcgtcatcgtcccgtatttttcaattccggtttggatttcagctgctaattgttccgctttagccgccatttctggttcatccacaatcgtcgtcaaaatttcggttaaataacgtaaaataacgaccgcaaacatattggctgggactaagtaaccatactgacaagcatcatcacttggtcgaaagccagaccaactcatcccggtataaccaactggttcgccaagaccgccgtgggttaatgaatcttcgggccgatcttcaacccgttcaaaccgataatcggaatgttcgtggtgttgttcaacttcaatcacctttaataatttacggattgccgaaataaaggtaacatcgaattgcgtcgttaagccggtattcttataaagtaggtaagccaattgcactgggtaacacaatgaatccaattcatatttacgttcccaaatccaaggggtcatcttcgtaacatcggtttgatgaccgtggccattaccggataaattaaacgcgttagcatacggatctaaattcatattaaaaaattgacggttgaccactttcaaaatcaaatccgcaacagctggatcagtttgcgccatgactaagtatggtcgcaattgtgcggtggaatcgcgttgccacatggccggaatatcgccggttaaaacaaacgcattttgatattgatccgcttcaatcgttgtttctaaagtgttggtataagtaatatcgaaaatttcagccaaattcttctggccctcggcacaaagttgattcacttttgttacgaaatcgcgaactgattgtgttacatatgattttgtcattttatcaccacttgttatatatttttacaaaccaagtatatcatttaataaattaaattctagtatttatcgcataaaatatttaattcaccataaaaatggtatacaatactacatatcaactgttgaatttaaaggagcgatgttattgactactaatgccaataaatatttacaaatttttgaaacattaaaaagccagatttggaccggggagtacgtggccggtcaacaattaccctctgaaaatgaactagccaaaacctatcaagtgagccggattacctccaaacgggccttacaagaactagccgatatcggtctagtcgaacggcaccaaggcagtgggacctttgttcgacgagcttttaaacactatccacgcaccaatcaactcttgctggtcattccattcgcctctgaatcaggactgggcgattatattaccggtgttaaagaaatcttggcgccgctacaacaatccttggtagtcatcgaaaataaggatttcaccttcacaaccgtggcggatttagcaacgcaatatgatggcctcatctattatccccaaaatctggccgctgaattaccacaaattaatcaattgttactccaccattttccctttgtcttaatcgataaaacggcgacaaatttaccggtcccgtccgtcgtttcggacaatacccagggtggctatctagcaaccaacactttaattgaagccggtcaccaaaatatcgcctttttggcgcaaagcgatttaaccaccaccttgaattcatctgcgacctaccgttatttcggatatattcaggcccttggtgaacacgatttaacctttgcaacgactcctcactcggcgacggccttaaccagcgatcattttgctgacttgttaccagcacttcgtcaaaataacgtcaccgccttggtttgcgaacacgatattctagcgttgcaactcttaacctttttaacggcgcacaacgtcaaagtccccgaaacactatcggtcattgggtttgataacattgcccaaacggccactagccaaccacaattgacgacgattatgcaaaacttctgcgaaattggtcgccaggccgcacgcctgttacaaacccggatggccaatccctatgatcccaaagcggctcagataaccgtcccagttgaattaatggcccgcttatcggtcaatccagaaccaacaatctaagcccgattacttgatattgcaattattttttaaataaacgattaaaggagtatttagtttgatgaaaataactgaaattgatacccgccaaggcaccctcaataattaccgcttttcaaatggcaatacattacccttgaccggcaccccctttgccatgaattatttcactattcaaaataatggtggtaatggtagttggtttttcgatcccaattcacggcgttttgaaggctttcgcttaacccatcaaccgagtccttgggttggtgatttccaacatcttcaaatactacccctaacacaacaaccccatgaagtcatcaatgaattagccggctcgtttgatccgcaacaagctacttttagcccgactaaactagcacttcatgatttacgctatcaagtgagtagtcaattgaccccttcaacctatggggccattttacacagccaatacccgtcaaccggtcaagcaggtctgcaattcgaactgccaggccaatttgaattgaccatcacggaacaagccgtttacgggtggctttctaatttttctgattgcgaagatcccgattttaaaatgtacgtggcctttcatttctcacaaccattactgctcgaccaaacacaattattaaacaccaactgtcaaccactcgattgccccgataaacaacatatcagtggcacagatggtcggctatgcctatttttgactggtcatgaaaatgacttacaatttgccacttcttttatttcaccggaacaagcgcagctcaatttacaacgccaattaaccaaagattttgatcaacatttattggccgctaatcaaagttggcaaacttattttgatcggattgcgattcaagatcaacaacatcccgagcgcgtgcaaactttctacacgactttgtatcgcttattcctattccctcaaaaattctatgaattggatgcgaaacaccaacccgttcattatgatacgaaagctcggtgcgttaaacccggtattttgtacacgaataatggtttttgggacacctataaaacggtctatccgttcttctcgattattgcgcccgaactactgcaagaaatgttgcaaggcttcctaacgagctattacgaaacggattatttaccaaaatggttatcccccgacgaacgcggaatgatgcccggcacgctaattgatgccgtcattgcagatgcagctagtaaagatttgattgataaatcgcaattatctgaatttttaacagcgatgctcaaaggcgccactactcaaagtactgattctaaatatggccgtcgcgggactgaagattatctcgaatatggttacgtcccaaacacccacgacgaaagtgtcaaccacacactcgactacgcttacagcgactattgcattgccgttgtcgcccaaaaattaggtcaaactgaactagcagccaaatatcaacacagcgcgctcaattaccgccacttatttgatactcaatcgaaatttatccgagctaaagacccccaaggcaacttccaagctaatttttcagcaatcgaatggggcaacggctacgctgagggtggtgcttggcaaaatggctttgctgtttaccaagatattgcagggcttagcgaactgcacggcggcaaccaagctttctatcaaaaactcgttgaattagtcaatacccaaccacgctttaaagtcggtcactacgggtttgaaatccacgaaatgactgaaatggtcgctttaaactttggccaactcgctatgtctaatcaaccaagtttccatattccttacctcttcgcttatgtcgatcatcctgaaatgactgaattgcttgttaaacaattattactaaatgcttttaacgccggcttttccggtttcccgggagatgaagataacggttcgatggccggctggtacgtcttatcggcacttgggttctatcccgtaacaccgggcagtggtcaatacgttctgggcatgccaatttttgacaatgtcatcctccacctgcctgatcaaaaagaattgacgctaaccacggttaataatagtgatcacaatctttttgtccaaaatcgtcaattaaataagcaactttatcgccattcgtacatcacccatcaagacctcatggctggtggaacctttacgaccactttgggattggcgcctaatccacaacctagcgacaatcagccattttcaattagtactgaacattaaaaacgacaaaataagctgtgacagaactcggttattaattgagtatcaagttaaaaaatcgatttttattcagcctcagatggctgttttcatatgttgttttaaccatggtaagattcgtaaatataaaataccaaagacgaccgtgaccaaaccacctttaatcaagttgaacggtactaacccgatcaagacgtactggagggttgacatgcctaaattgagccccattaatcgaatatagagtggtaaaataaagagccaattggccaagaccatcacaatcgtcatactgattgaactgacgaccccagcaaaaatttgacctttcacaacgcttttttgccgtttgaataaataataaaacggtaaaagataaaaaatagacgctaacactccggcaaaatcgcccaccaaacttggcagactagcacccgtcatgatgaaatggagtaccgagcgaatcaccgccaccccgataccaccaagtggcccgtaaataaaggttccgagtaaaacaatcacatcactaaaatcgaccttcaaaaaaggaaaagccaaaatgatgggaaactcgaaaaacatcacaataaatgaaattgcgcctaacatggcgacgccaaccattgtccgtacttttgatgcatgcatcgtaacaccctccaaatgaggttgtcttcatttgcgaactcaaagtgtttgattgcattaaaaaaggtctattaaccagggtgattaatagaccttaaatgaatacattcatacccaaataagctctatcttcttccatctagactttcactatcggtaccggagtcacaccggttcagccactgcagatgcagcaggtcgcggactattaccgccggtcgggaattacaccctgccctgaagacgaaccattaatatttacttcacggaaagcataccaaaaaataatcctaaaagcaacgatttactttcggtttttatgccgtggtttttcactgagttctgccatctttttgaattctgcgacttcgattggtttcaacgcccggtattcacccgacactaaaccatcaagggttaagaaactataggtttcccgtttcaatttagaaacaggtagcccgacagccgctaacatatttttaacttgatgattcatcccttcgtgaatcgtaatgctgatgatggccgtatttttccgacgatcagttgaaataattttcgttttagctggcgctgttttacgtttttctaacacaatccctttacgtaattgacgtaacatatcaggcgttggaatccctgagaccttagccacataggtcttatcaaccttatatttaggatgcattaacatgttggcaaagtccccatcgttggttaataacaataaccctgatgtatcgtaatcaagccgaccaactggataaacccgttctggaatatcttcaagatattcagtcacgacgggccgtttcttatcatcagtcactgcagaaatgacttggcgtggtttgtataacatgtaataaactttacgttcccgtgttaacgggacaccatccacttcgatatgttctgaaccttcaaccttgatacccatttcggtcacgactttaccattaatggtgacgtgtcccgtttgaatcagtgtttcagcctttcgccgagaagcaaccccagcgttagcgatgactttttgtagtcgttccatttattgttctcctttatcgtccgtttgtggactaacttcatttaatgtttgttcaaattgacggaaatataaatcagccgtatccgctactggttggttttcatccaccgttaattctaattgttccaactctggtaattctttaagcgttgttaaaccaaaataatctaaaaaataatcgctcgttccgtataaaatcggtcgaccaggggcatctttgcgccctttttcaagcaccaattgccgcgctaataacgtctgaatggccccgctgctttgcacgccacgaacttcatcgatctcaattcgcgttagcggttgtcggtagacgacaatcgccaatacttctaaagcggcttggctaatactcgtcgaaaccggacccgcaaagtaacgtttaatcaatggtgccatttcttttttggtgactaacttataacaatcagcggcttgaatcaggcaaatacctgaatggtcatcagtttgatagcgctgacctagtttttccaataactggcgaaccgcggcctcatccaataacactaattgtgcaatttgggttagggtcaccccttcatcaccggcaacgtataataaactttcaatttcagcgagatgcttcactagtcgattcctctttcaacatcacaaaaatctgggtctgataagttagctgatcacagacaatgcgacgatctttcattaattctaatatcgctaagaaggtggtgacaatttcatcacaatcattgggattcacaaccaacgattcaaacgtcaccgcattggcttggcgacttaactggtttgtaatccaattcattttttcagtaatcgaaatttcgtcattctggacggttttaaaaaccggttgactagctttggcctccgctaacatcttggaaaccgccgctgctaaatcacggggtttaatcacaccgcgcgcaagtggcaccactttttcagcgggattggtactagccggtttcgcaaaaagttgttggcgttccatttcacgttcttgcaaaacaccggcaatcttttgaaaagcctggtaagccaataactgatcgaccagttcttgacgcggatcaacatagtcgatggcctcttcttcttccaacaccggtggctttggcaacaataatttgcttttaatcttcattaacgttgccgccatcactaaataatcacccgcaatatcgagggctagttcttgcatttgatgcaagtaatccaggtattgcgcggtgatttcagcaatggggatatcataaatatcaatctttgtttgtttaattaaatgtaataataaatccaagggtccttcaaaatcagaaaggaccaacgtcaactgttcagtcatctcgcaactaatccatttctttagtctggtgctgttcccacttagcaattaaagccgctgtgtctaaagaacccatcacccgactcttaggatacatcgccgctaattcgtctaacacttcataaaaccggtggtcactgcgctcagacggattcagtgaaatgtgccgcactaatatataatcagtccccaattcaatcccaacaattccagcaaaatcacctgcttcattttgccaaaggtataaaatatgttggtcatcgttattgtaaaaagcaagttctgattgaacatgcgacacttcttttagatcagggataaacgataaaaagcccatcgcaatcttctcataatcatttttgtacttaaataacatgttgacctccaatgatcaagcaaagttctaatagcataactctaccacagatgctaaccaacaacaaatacgctcagtctctggggtggcttctttgataaacctctgtcagatgttttttactgatatgcgtataaatttgagtggttgaaatatcagaatgccccaatagctcttggacaatccgtaaatcagccccattttcaagtaaaacagtcgcgaacgaatgtcgtagtgtatggggggtgacatccttttcaatcccggctaacttaacgtacatcttgagattcttccagatgccttggcgcgttaacccattaccatgaaagttaacgaacaagtaagggtttgactgccccttggttaacttcgggcgactgcggtctaaatattgattgacccaatcaaccgcgacatcgccaatcggaataatccgttccttgtttcctttaccaatcgtttgaattaagcccaacgataaatgtaaatcggctaatttcaaatgaatcaactcactaacccgtagcccggttgcgtataacacttccaatattgcccgatcgcgtaagcctaatggttttgcggtatccggtgtctgcaacagtcgttcgatctcgctagaagataaaacggccggcaaatgccgaccttgtttcggggaatcaatttgtaacatcggattaatctcgatttgtttttcacgcaataaatactgataaaacttacgtaacgtcgaaatactccgcgtgatactgctctgcgctttatgcgcatccgtttgaacttgtaaataattgataatcacaaaatgatcctgcgtaaatccggttaactgctgttgttctaaataggccgtaaattggaataaatcttggcgataactactccgggtattatccgataggccacgttcaatctttaaatagtgtaaatagtcttcaattaacgtttgcatatttttctccggactatagctgacttaagtcaatttggcgcgtcacgtcgactttattagcgggcagcccgttggccacgttcacggtttgacaatggtcacaaacgccttgtaaggttaaccgatgatccaacaccgcaaattgaaatttagccaacacttcggcttcaacgtctgtcaataaatcttcatgaatttcttgaatttgaccacattgcaggcacaataaatgatgatgaaaatggctattttgattgggttcacataaatcataatgggtaatcccatcttcaataaaactaattttatttaaaatgtgcaattccgtcaaaatttccagcgttcgataaaccgtcgctaaaccaatttctggtgccactgacttggtcaacataaacacttgttcagcacttagatggtcctgataatgatctaaaataatggcaacggtcgcttcacgttgtgaggttaatttaaagccggcctgttgtaattgatgtcgtattttttctaattgcgctgttttatccataatcgacttccttcactccattacactcaaaatgattagtccgttaaatcagcttgacctttatccgttaagcgcgtttgaccgtctttttgttcgattaaaccgctcttcatcaaacgacctaacgcccgtttgaaactccccttactaatcccaaaataacctttgatatcgtctgggtcactcttatcggtgtaaggcatcgtgccatctggttggcgttttaaaacggcaatgatcatttcggcatcgtcaccgatttcttcataggcccgtggtttcaagctgacgtttaagctaccttctggtcggacaccaatcacccgaccttgaaccatttggcccaaacggggttctgcttcgcgttcggaaggatgaatgaaaccaatatagaaatcatccgttaataggaacgtgccgactaattttaagcggtaaacggtcccttcaacattttcattcttcatttctggtttagccgcttttgaaattgatctaaatatggcttcatcggcaatcttaccccaagtccgacctttttcatcgacttcaagtgcgatcatcaaacgatcaccaggtttgggccataatttattgatggttggcaattcatctaacgaaacgaccatgtccttatcgggtaaaccgatattgacgaagacacctagatcacggcgcgtttcaacgacttcaccaaaggcgtaatggcccactcttgattttggaataaacgtcgtcaagattaattcacgacttgagttctcataagcaaaaccttcaaccgtatcaccgatttcaggcactgtttcaagcccttctttgttaagctttaacgtcacgccatctttttgaacgaagaaagcatcttcgttttcatctgtgactagggcggtaataatttgtccgattaagttgttcatagtttacctcgtttttttatttagtggaacggtattaaattaaagactgttaaaattgtatacgtcaaaccagcggcaatcaccggaccggccgcaatgccttttaagaagacaacgcccataatggtcccaaaaactaacgcaacggtcatttcaggactcgccgccaataagccaacccctttggctgaaagaacggcaactaagaccccacagccgactgcgataaacccggccggcgttttaaaggcgttcaacaaatccttaaagccgatttgaccggtcgcaatcggaattaagatggcgaccgaaatgacggtcacgccccaattaatccctttcgcctgaataatcgggaaaagtttgtttgaaaatggcaatagttttaacgctaaaacaactgccgacgcgatgattaatgattggtttttacctaataaggcgacgattaaaatcgccgctaaaaatagccagctctccatagtgacctccaataaagtctctctactattgtaacgataaacgcggaccttgtcagcaaattatcaaaactattttcagaaactcacaaaaaaacgtctgacaaaataagcattttgtcagacgtttcttcaaatatcggttctaatgaacctgttgattaaagcgcgtttgtagcaccgcgataaacgataccacgacgtgaatcaactgtgatgacttcgccatctttgatagcatcagttgcatctttagcaccaacaacaactgggatacccatagcgataccaacaacagcagcgtgtgatgttaaaccaccgttttcaacaacgatagcacttgatttttcgattgctggtaagtaatctttatcagttgatttaacaactaagataccaccatcaactgctttatcagcagcttctttagcgtttgaggcaacaacagccttgccaacgattgtttcatcgccaacgccttggccttgtgttaatttagaaccaattaattggatcttcataacgttagttgtgccacgttcgccaactggtacaccggcagtgatcaagattaggtcgccttctttagcaaaaccatattcttgagctgtttgtgttgccaagttgaacatatcgtcagtgttagctggtttcttagcaacaactgggtaaacaccgtagctaactgttaagctacgacgagtacgttcgtcaaatgtaacggctaagatgtcagcttgtggccgatatttagaaatcatacgtgctgttgaacctgattcagttgcagcaacgattgtcttgatgcctaagttatgagcagtatgagcaacagcttggccgattgattcagtcaagtttgttttgctgtatgcttttaaagcataagcatcacggtctgttaatgctttttcagtacgttcgtcgatacgagccatagttgcaacagcttctactgggtagtcaccgttagcactttcacctgaaagcattgttgcatcagtaccgtccataacagcgttagcaacgtcattaacttcggcacgtgtaggacgtgggttttcttgcattgagtctaacatttgtgttgcagtgataactggtttaccaattgcattacacttcttgattaagctcttttgtacgaaaggtacgttttcgaatggaatttcaacacccatgtcaccacgagcaatcattaaaccatcagaaactttcatgatatcgtcaatattgtcgataccttcttgtgattcgattttagggaagatttgcacatgttccatgtgtttttcttctaataattgacgaatgtctaaaacatcttgaggtttacgaacaaaacttgcagcgataaagttaatttcgttatctaaaccaaaacggatgtcactagcatctttttctgtgataccaggtaagttgattgaaacaccaggtgcgttaacacccttacgtgagccgaccataccatcattttgaacttcagtaacaagttcgttagcaacttcgtctttttcaataatcttaagatccactaaaccatcatcgattaaaacgtggccaccaacgtgtgtatcagcgaataaacctgggtaagtaacagcaatcttttcaggcgttccttcaagtgtatcgtccattgaaatgcgcactgtttcgccagtgtgtaattcaaatttcttaccaacttgaacagttgtccgaatttcagcaccctttgtatctaacatgataccaactgttttaccagttaatttttcagcttcgtgaaccattgtcattcggcttaaatgttcttcatgatcaccatgtgagaagttaaagcggaatacgttagcgcctgcttcgattaattttgtgatgatttctacactattacttgcgggaccaagtgtacttacgatcttggtttttttcataagtggagtctctccttttatgtctctttttttaaaagactttgcagtcattttaacaaatttattgtgaaacgttactagtatgctaaatcagcgtttaaatcgtacaaccctaattgagcgtgatgcttgtgattgaacaagtctgtaatatcatgtgcaataatttcattcttttcaatccctaacgccaaaccgcctttgccttcaagcaataattcaactgcttttgagcccaaacgacttgctaaaacacgatcgctagctgttggtgaaccaccacggacaacgtgtcctaagacagttgaacgtaagtggaaatcgccgtattcagataatttttctgaaaattcatcagcatgcatcacgccttcagctaatacgatgatggcatgtttttgaccatgttcacgtgaagcacgtaatttgtcagccactgcttttacatcaaaatcatgttctggaataataatatcttgtgcgccaccggcaacgccggcccacaatgcgatatcaccagcaccacgacccatcacttctaccacgaaagttctttcgtgactggcagctgtatcgcggattctatcgattgattcaagcaccgtgttaaccgctgtatcaaaaccgattgtttggtcagtaaatggaatatcattatcaattgttcctggtagtccaattgtgttataaccatgttctgtcaaacgaagtgcaccgtgataagaaccgtcaccgccgataacaaccaaggcttcaatcccaaacttgttgagttgttcgatcccttttagttgtccttcgacttgtgcaaattctggataacgagctgaatacaagaaagtaccgccacgttgaaccttgtcaccaactgtaattggatccatcttgaagatatcaccggccactaaaccagcgaaaccgtaattgataccatagacttcaaggccttcatgcattgcttttcttgcaacggcacggattgcagcgttcataccaggtgcatccccaccacttgtcaaaatacctatgcgtttcatcttttcaccccaggcaaatattttacttgaaaaaaccatttggtcatttcaaagtcactaatatagtatcacttttcagaaaagaagtcttgtattttgcgaactttttccgaaagatgttttcattttatgattctaaaaagccttttaaaatggcgtttcccgttcctaacaggcttgtaagcgccgtcgttaatgtcgactgaccattcacccaataatgttctttcaacaaaattgattgtttcgtcgcagcattatacaagataacaggcacctgaccgggctgctgttccaacaaccgatatagctggcgttcctggtcaatcgtcaacgcggtttggacccgcaaatacagcgtggcttttggcaagcccttttgaacgtcatccgctaattgaatctgattcgcaacgatttgcaactcgcgccgttcttcaatcttcccggtcaccagcaacacttgttccgttgctaaccaacttgcgacttgttgatagagattcgcaaagatcgtgatactgatttcccccgtcgcatcttgcccggtgacaaacgccatctgatcgccttttttagtccgaatcactttaatgcgccgaatgaagaggaccaagcgcacattttgtccggcgtggagttcgctgattgccggaatatggtaataccgccgcgtccgttcgtatttttcgactgggtgacccgatagataggcgcctaaatactctgcttctttatcgagtcgttcagtcaacgttaaattcggtacatctttaggtttgggcgcgagaacttcgaataaatccaagctatcgcccgccaattggatactgtctaataagtctggcaaattcgtcaacaattgattccgattcgcgttaaacccgtcaaacgcgccactgtaaatcagtgccgtcaaattatccgactttaaaaatttacgatcgattcgttgtaaaaattgtaacaacgattgatacggaccgttggtttggcgttccgtcagcatcgatacaacaaaatcgcgacgtagccctttgatactatacaaaccgaatataatgccatcatcatccaacttaaaataccgttgactccggttgatatccggtggccgaaccgtaatctgccgtttcttcgcttcggtgagataggttttagtcttagtcgattggttcaacaccgcattcaacaaggccgcaaaaaaggctgctggataatggacttttaaataggctaaccaatacgcaatcttactgtaagcgaccgcgtgtgaccggttaaagccgtaattagcaaaccgttcgatatagtcgtagaccttcgtcgcaacggcttcgctatgcccccgttcaagcgcgccttgaatgaatttagtccggttagcgtcaatcaccgcttttttctttttactcatcgcccgccggagtaaatcggcttcccctaacgtaaatccgcccatctcagaagccgcttgcatgacttgttcttgatagacaataatgccataggttggcgctagaatcgtcgctagtgaatcatcaggataggtcactggttcttgaccatttttacgcgcaataaacgtgtcgatgttctccattggccctggtcggtacaacgcatcggtcgcaacgatatcttcaaacgaagtcggtttcaaccggcgtaacacatttttaatcccggccgattcaaattgaaaaatcccgttagtatccccctgttgaaagagcgccaaggttgcttgatcgtccaacggtatctgatgtggatcaaatgattggccggtttgttgaccgactaatttaacgatattggctaaaatacccaagttacgtaagcctaagaaatcgattttcaacagacccaattcttcaacgttgcccatcggaaattgggtaagttcaatcgcgtccccaccactttgaagcgctacagtatcggtcaacggtgcctgacttaacacaatcccagccgcatgcgttgaataatgccggggtaggccttcaattcgctgagcggtttcaaataacaaccgattttgctgactatcggcgaccaaattttgtaagacttgcgactgttgataggcttcttgtagactgatttttaagacattcggaattgccttagaccaactactcatttcaaattgactgagcccaaaaactcggccgacgtcgcgcaaggccatcttcgccgccaaggtcccaaaagtaataatctgggccatatgattatagccgtatttctgataaacgtaatccaagacttcatcacggcgattatccggaatatctaaatcaatatccggcatattcgcgcggttcgggtttaagaatcgttcaaacagcagttggtactgaatgggatcgacatcggtaatcgctaatgcgtaagccactaatgaacccgcagccgatccccgacctggtccggtcataatctgttgttgatgtgcgtgtgccataacatcggcaacaatcaagaaataatcggcaaaacccatctcgaaaatgaccttgagttcgtattgtaaccgcgattgatattcagccggcactgacgcccctgcaaatcgcgcctctaaaccactttgactttgcgtttctaaataatcattcgcggattcttgctgcggcgtttcaaatcgaggaagttgagcccgtttgaaggttaattcgacctgacaagccgccgcgatggtttgcgtattttggactgcttcagctaatgccaacgcttcaaattcagcggtaatctgcgttgcactctgcagataatagccccctggttgctcctgatcagtcgtttgtaaattaatttgggtccccgctttaatgtgttgcaatacttgaactgaaaaagcgtctgttggttgcaagtaacgaacatcacctagcgccactaacggcacttgactggcttggctcaacgcgattaaacccgtccgttgtggactagcggcctgtttatcactgattcctaaataaagactgtcggcatcaaccgccgcctttaattgggctaaataggcttgtgcttgttggtcagcgtcttgcaataacaaacggacaacttcacttttttgggctggggtgatgacaattaaatggctcaataatttttgaatggcttcaaaactaaccatttcagtttgacacataatttgcgatgaaatttgtaaaagatgttgataacccacttgatctttcgctaacaaaataagcggaaaacgttcctcgagttgttgcagtccaccaacttcaatcgttaaaccgagtattggttggatgtcggccgcttgagctgccttataaaaatcaactaggccgtaaaccacgttcgtatcggtcaacgctaaactttgatagccttgctctttggccgtttgaaccaaatcagctactttagtcgtactttctaaaagcgtatacgtacttttaacttgcaactgaacaaacgtcatcaaacgcgccttctttctccggagtcttttttgaataattctagtataccaaattatttcgaatgaatctctttccaaaacgtgttacaatatcatagaattggatcaaagaaagaaggccaaccatgaaatacgttatgaacctcatctggacactcatttttggattcgtccttggttttatcggttctaaattagacaaaacagactttagtgtacaaacaacgctgattgtttccgtcttgttcggattaatcttgaacctattaccacttgttttacctaaaaaaatcgcttaatcattgattaagttatatcaataaagcgcccaatcaaccgaaatgctggctgattgggcgctttatttttatttatttcgtaatgtagatgtataaatcactggctgaaaaaccagtattaaaattaaccccgtttgaatgaatcgtcttcattgtcgtttgattatctttttgacttttcttggtgaattgttcaaattcatgcatcactttagtcgcgtcagccccggttgctttagccaacaacgtaaagctaatcccaaattctttaagggccgctttatttttcaacgccttaaccggtgcaatcaaggtcaatcctagaatctgatcatcttgaacgttggcccgaatcgttgtatttttagtcttaagcaactgttgcacgccatcgtccaccttagttggcaacaattgtttagcttgcgtttgctgcgctttaatcatggcagcttgaacggcctgttgcgtcgtttgcaactcggtcaactgatcggccgtagcttgaccgtctttaagcgcttgtgtttgtttttggagcgattgcgctttagcttggtcgtccttagaaagtgccatgccaactaacgcttgattataagtgccaacaactgttcggtaatcgcctaacgttttacccgccgcgaccgttacttttttggtcgttgttttttgagccgtcttcgccttgatcgtcaccgtttgtttttgagtggttgcaggcacttgaatgacataggtgccacttttaaccgttacttttttagctttggcttgatcaatttggtacgttaacgttgcctttttagccgcggtccctttgaccacagcgaccattccattttgttgataattggttttactagtcgttaattgggcttgaccacaacccgctagtacacccagtaaccctaaactagcgattgctagcattgtctttttcatttctcgtcaccttttcatcttatagattagcttgttcagcgtaccctttttaactgattttttcaaggattaatgacgagttgtcatgtttttagtattaaaaaaggttgcccactggacaaccttttagaattaagctttcaatttcattttcttctcgtaacgactgaacatgaaccatgcaacaaccgtaaagaagaccggtccagcgattgaccacaatgtttgtttaatattgccatcaattgcgggttgaataatcgtaaagacgttcgcaaacccaaccgtaaacatgaccataatgacacagaatttatagaaggtcttacctttataaattgtaaatggtttttcgattgaatcgtccttcttgaaaccgaagaaagcaaaagcgacaaacatgtatggtaacgtcattgaaacgttagtcatcgctgttaaaatttcaaagaatatagcagcgtttttaccaccaaaggcaacgaaagcaataatgacaatcacgattgctgcttgagctttcatcgcgttaactggcatattgtgttcgttcttcttagtgaatgacttaggccataattcagcaggtgtcccttcaatcaatgtcttcaatggtgagaagatcaacgtgaagaacgcaccagaaagcgctaagaacattgacaagcccatgtaacggcttaaccaaatcccaacttgaattgcagcgtgttggcttaggtttaaggctaatcctaattggtaacccatgttattcatagcgatgtaagccacgttacctaatgtgacttgcgctgttgaaccggttgctttcgcaaaaccgctattagcagcaaaagtgaagtcccagttagtaaaagtccccatcataaagatcccgatggcgtaaccgatggcaatgataattgctgaaattgccaaacctttagggaagttgactttcgcattttcagtttcatcaactaacccaccaacaacttctaaaccaccataagcgaagattgcgaagacgacgaaactaaagacttgaatcatcgacgtataactttcgtttggtgattggaaaaaggcgtgagccgtgattggttgtgccataacgcctttattaagtactaggattaacatcccgcctaagaataaaatgacgttaattaacgtaatcgcagtcccaccgatacttgttacttttttgattttgtccaaccctttagaagtgacaaaggtaattacgataatccaaataattgctaaaatacctaacgtttgaaccccgttagtcaaaccaaagattgaccagctctgcgtcttatcaaccccgaaaatcgcatttgataatggaatccaaatcccgttaccaacgttgaccatccagataatgtaagaagcaaaccacatgaaggtgccgatgaaggcaaacttcgcattaactgatttctccatccatgagtaaatcccacctttggcttccccaaaagcggctcccatttcccctaacataaatgcataagggatgaagaaggttactgctgctaaaacataccagaaaattgatgcatatcccattaagtaaaatgcacgcgggatattcgtaaagccaaagactgacgtgaaaatcattagaataagtgcgcctaacgtcaacttactcgtctttttcttttctgccatccaaaacacctcttccatttctaatccaccttaattaaaacattaaccaaggtggtcgtactcgatgcattaatactaattactccccttcattttaatgggtattgggctaggggtaaacggatacagtgcttttctaatctaattattttgttttataatcattttctaatcttaataaacatttttagtcgttttctaatgatttgcttagagtccacaaaaaaagaacgatcatccacgagggataatcgttcttctaaaggaaattagtcgttagcttttggtgtaacaacttgttcgcctttgtaaaagccttttggtgaaacacggtgacttacacggtattcgccatttgttgcatcgaattgtacgttaggtgtgttcaatttgatatgtccacgacgcatacgtttcttcgtctttgatgttcttcttgctggaactgccattattttcagactcctttgtatcttagattcattaatgatataccgaactcagggaatttagcaagctttttcctaactaaccaaattgacgttgaaattaatcagccgtcccactacttttgtccgcgacttctataatactatgtttaactcataagagcaagtgatttcatgaaaatcaaatcatttacctcagagtcaatcatccgataatcgcatcagcatagccattcttttcagtataccatagaactaaaggagaatgaccgttaatttacactttaaaaactaattgattgtcctttaaatcaatttcaaccgttgtatcgggcaaaatatcgccaccaattagtttcttggctaacggcgtttcaacataattcgtgatgtaacggcgtaatggccgggccccaaaagcgggatcatacccttcttgggcaacccaacttttagcggcgtccgacatcgtcaacgtaatatcttgatccgccaatcgttctgataattcagcgaccattttgaccacaatttgttgaatatcaagtaagctcaacggtgtaaacataattgtatcatcaatccggtttaaaaattctggtttgaatttcgtttgaatcaacgcgtgcacttgattttgcgttacttctgaaatttgaccttgttcatcgacaccgtctaataataattctgaaccaaggttagacgtcatgatgataatcgtattcttaaaatcaaccgtgcgaccttgtgaatccgttaaacggccgtcatctaaaacttgcaacaagatattaaagacatccggatgggccttttcaatctcatctaacaagacaatcgtatatggattacggcgcaccgcttcagtcagttggccgccttcttcataacctacataacctggtgccgccccgactaagcgtgaaacggaatatttttccatatattcactcatatcaattcgaaccatgtgtttttcagaatcaaataggtcctcggcgagtgccttcgccaattccgttttaccaaccccagttgggcctaggaacaagaatgagcccaatggccggctagggttctgcaagccagcacgcgcccgtaaaacggcatctgtgaccgcattgactgcttggtcttgcccaaccacgcgttcatgcaaatgatccgctagttttaaaagtttttgccgatcgccggccactaatttagcgactggaatacccgtttgtgaactgagcactgcggcaatttcattttcagtgactgattcttgaaccatccagtcctctggtttttcatcctgttcaagcttggctaacgcttgttcgagttgcggaatggtcccgtgttgtaatttcgcggccttttcaagatcgtaattactttgcgcgtcctctaattcatgtttagccgcatcaatttctgcttttttatcgttgattaaattcaaatcagccttttcggtttcccaacgcatcttcaaactattcgtggtttcacgtaaatcggctaattgtttttgggtttcagccaaccgtttttgggaagcggcatccgtttccttcttcaaggccgcctcttcaatttctaattgcatcaattggcgcgttgcttggtctaattcagttggttgtgaattcatttcgacattgatattcgcactggcttcatcgaccaaatcaatcgccttatctggtaagaaacgatcggtaatgtaacggttcgacaacgttgcagcggcgactaaggcgttgtcatgaattcggacgccgtggaaaatttcgaagcgttcttttaacccccgcaaaatactaatcgtatcctcaacggttggttcttgaattaagactttttggaagcgccgttcaagcgctttgtctttttcaatattttgacgatattcatcgagcgttgtcgccccaatcatgtggagttccccccgggctagcatcggcttcaatagattaccagcgtccatgctgccttcagttttacccgcaccaacaatcgtatgaatttcatcaataaagagcaagacttggccttcactcttcttaacttcagctaaaacagcttttagccgttcttcaaattcaccacgatatttagcgccggcaatcagactccccatatctaacgaaataatcgtcttgttcttaaggttttcgggcacgtcttttcggacaattcgttgcgctaagccttcgacgattgccgttttaccaacccctggttcaccgattagaaccgggttatttttcgttttacgcgataaaatccgaatcacatcgcgaatttcttcatcccgaccgatgactggatccattttaccagaacgaaccgctttgactaagtccgtcccgtatttcgctaatgcttgataattatcttcttggtttttagatgtcactcgttgccctcctcttaatttagtcacgactgctttcaacgttttgagtgttacttgttgttgttttaaatattggaccattggttgatatttaagcgccattaagcccaaaatgagcgtttcggttgatagatattcatcttgaaattcttttttgtatttctcggcttccgttaaaacttggtatagatttttcgaaacattctgcccatattgactttgaccttcaaccgttggaatcgcatcgatttcgcgatcaatttcggcttctaaaccagctaaatcaacgccggcttcttgataaatctgttggcctaattgttgcggttgaatcaaaaatttaaaaagatggggaatatcgatttctgtttggtgccgtgtcattgcaattttttgtgcttcggcaatggcatcttgaactgcctgagtcatttgttctggattcataaacgtcattcctttttaagtttatttttgaattaacgttagttgtttgactaactattattataatagtcaaaataggtcaaacattcaagtgatttgcttctaaatcagactttagtccaattaaaaaagcgagcacacacccgattatcggatggcactcgctacttgtttaaaactaagcgttatgatgatcgctcgtttgcgaaatttgattaatcttggcgtgtaattcatgcacttcagcttctttatcggctaacgcttgatcaaactgcttttgcgcctttgcagtcgctgcatcaaccgctttttgaaccgtttcggcttgttctgcttgggctttcgctaattcttgggtcaattgtttatgcattttcttttgactcaacgtactccccgtggcagccaagaacgtaatgatcgccccaattaacaacgagacgatgatgacaataatcaacggccattggacgtgggcaaacccaaagttgaccgcgactggcgccacatttaatacggcaaaaatcacaacaatcaacgctaatcctaaaacagtaattaaacgaccttgttttttcatttaaatgctcctcacttttgattgaatatcgtactggctagataatcacccacactaggggctaaatcatataattgggcagcggcactcattaagaacggcgcgttaatttcacgttttggatgaccaatcgctctgacaatccgtttcgctaatcgttcaggatcaagcacaatccaatcaaccgtttctaaatactgaccggtttgatcggcaatcttgaaaaagtccgtatcaatcggacccggattgatcgtggtgacttggacgcctaatggtttcaattctaagcgcaacccattcgaataaccaatcacggcaaatttagtcgctgaataaatcgctgacttttgagtcgccattttacccgccattgaagcaatattaataatttggccaacgccttgatcaaccattaacgatccgagtgcccgcgttaaatacatcaaccctaacacgttgactcgaaacatttgttcaaccgttgccatcggtgtttcaagcgccgtttcaaaatgaccaaaaccagcggcattgactagcacatctacgcgaccaatatcattttcaatttggccaacgacttgttcaatcatttctggattgctgacatccaattggtaagcataagcgggttgccctgataacgcttggcattgatcgcgcacgatttgcaactcggcttgacgccgggctaagaccacaatcaccgctccttggctcgctgcttcataggcaatggccttgcccaaacctgatgaaccgcctgtaatcacaattacattttgttttaaatcctgtagatctgctaatttaaccatgtttattcatcctttcgaccgtgaaatgggatatcataaatatctaaatcgctaacaacctttgtattcttaaaaatcgcccgcgcatcgttttgtaattctcggacggcttggcccagataccgagctgaaatatgggtcaacaataaacgattgacttgcgcttttttagcgactttagctgcgttaatattcgttgaatgataatattgatgtgcaattttttgttcttgtttgccaaaggtactttcatggactaacacatccgcgttagccgctaatggcacaatcgcttcgcaattgcgggtatccccgataatggtcacaatccggcctttttgagcgtgcccgatataatcttgaccgttaatttgacggccatcagctagcgtaacggtttcgcctttctttatcttggcataaaccggtcccgccggcacactatctgcctgtaatttagcgacctgcaactcacctggatggtccttttcaataatccggaacccataactagcaatccgatggtctaatttggcacattcaacccgaaaagtttcatcgtctaacaagatgcctttattcggcaatacgacgaaattcaacggatacgttaaatgactctcagaaattttcaaactggttcggacgtattcttcaataccttttgggccgtagattattaaaggttcatcgccaccttgaaacgaacggcttgataagaagcccggtaacccaaacaaatggtcaccgtgtaaatgcgttaaaaagatttttttgacttttcgtggtttcaaggttgtctttaaaatttgatgttgcgttgcttccccgacatcaaacagccagatttcattgcgttcatccaataatttcaatgcaacactcgtgacgtttcgttgtcgtgcggggacaccagcgccagttcctaaaaattctaattccattaaactcttccatccttgtctacataacaaactatttatttttgaaccagtgctttggcgacaatcgccgtgtattctttcacaccagttgggttggggtgcacttgatcttggtagaaccaatcgccatgtttgctggcttggccgtaccaatcaatcaccgttaagttcggatactttttaaccgccccttttaacatttcattgacatcattttgccaaggccgggttggtacgaaggtgtttaaccaatagacttggcgttggctaccaatcgccgtcatgaattgatttaactgttctgcagtaaaggaaccattcgtccctaaactaattaaaacagtactgctcatcgcccctttttggacgtaatccttaataatcggcgtactcttgtacaattgccgcccgacagcggcgtccacaatcatattggggaagacttgttgtaacgactcacttgcatctaacaagaccgaatcaccaattgccgtgaccggtaatttttgggctttttgcaaagccacttgggtgaccccatatttttcaaattcctgattgaccggattcttttttgcggccgcttcagctgcttgatctgttggtgtctgcgttttgcctttggcctttttagctttcgcgattaacgcggccttctttttagcgttggcttttttatttttctgaatattgaccgccaacgctgatttatgagtattcggcgccgcttggctaggggcttgcattaaccccactagtgcgattaaaccaatcaatgatagaccggtcatgaagcccaccttgcgattccattttggatgcgcccagaattgacggaattgaccccataacttagcgtattgataatgcgcgagtggttgttcaatcaaccggtatgataattcggtaatcccgaaaataattgcgacttcaatcaccggatacaaaatgggatgatcggcgatgttcttaaaataactttcaaaaaaaatcatgaccggaaattgatagagataaatcccataactgcgtttccccaaccaattaaaaaccggattggtcaatacgcgattccaatccgaacccggatgggccaccacggccactagtaaacaaacgattacactaaataaccacatgccaccgcggtaaacccagacattttcggcatcgagattaaacattaaaaccaataatagtgccgcactgattaacccgacgccgtctaataatagtcgttgttgtgcgacgactttttgcttaagcgccgttgaaggccaagcaaaagcggtggctgcgcctaataggattgaaaagacacgggtatccgttccgtaatataaacgactcggatcagcgccgggctgatacaaaatcgccatccaaacggcggacactacacttaatcctaacaaaatttgggcaattcggtttttctttttaatcccaacgattaaagcaaccacgacaaacggccaaactaagtaaaattgaccttcaattgataacgtccataaatgcgtaaagggtgattcattattggcaaaccggtcaaaataggattgaccatgcccaatttgccaccaattataaacgtataaaatattggtgatgaccatttcatgtaactggtataacaattgcctttgaaacaacgtaatgtacgcactagtcgccagtaacatcgttagtaatcccggataaaggcgcttaatccgccgcacataaaagctcttcaaattgacccaattattctgctgccactcttggaccaataaatcagtaatcaagtaaccagagacaaccataaaaatcggcacgcctaaataaccacctgtaaaggtatagggcatcaaatgatacaagatgaccccgattaagccaattgcccgtaacccatcaaagccgctgatataccggctgtttttcaaacgtttctttccaaccatttctctacccactctgtattctgataagccttattatagcaatgttttagttaactgcctacattttcaataatttttttgtcagtgtgtcgcaaaaagtctgtgatcgaagtcttaacaggctcacatttaacgcggtttttctttatcgcgcaccagaaggcatcaatggccgttcaaatcaaaagagctgattatccttagtttctggataatcagctctttcaacttgataggcaatcgataacgtgccaacacacttatttattattcaacaaattcaaacgtaaagttatcaagtgctactaagtcaccatcgtgagcaccggcctcgcgtaaggcttcatcaatccccattgaacgcaattgacgtgcaaaacgcatgacgccatcttgatgggttaaattactcatcttaaagagtctttcaaccttagcacccgtaataataaaggtcccttcttcgtcttgttcaatttcaaaagcagggccttctggttgatattgatatagtttttgggcttcggttgcttcttcatcccccattgggaattcagcagtgtccgctaataaatcagccgttttgttcatcaaaggttgaaccccttgatgggtaatactagaaatttcaaaaatttcatgagtattaccagcagctgctaatttagctttaaaatcagctaataattcggcagaaccgggtagatccattttagtcgcgacaattacttgtggacgttctaaaattttaggatcataggtttctaattcatgattaatttgttcgtaatcttcataaggatcacggcccgtttgttcgtccatttcaactaaatgaaggacaacgcgcgtccgttcaacgtggcgtaagaattgaattcctaaaccaataccgtctgaagcgccttcgattaaaccgggtaaatcggcaagcacgaaatcgcggccatcatccaattgcaccatccctaagttagggaccaaggttgtaaattggtagctggcaatcttggggttagcactcgttacgactgacaataacgttgacttcccaactgatgggaatccaactaagccaacatccgctaacactttcaattctaattgaatactacgctcttcaccaggttcaccattttcggcaacttctggcgcgctatttttagcattcgcaaaacgcatattgccacgaccgccacggccaccacgaccgatgactaatttttgaccattctcagttaaatcgcccaatagttcatgggtatcggcatcgcgcacaattgtaccaggcggcacttgaacaaaggtatcctctgccccgtgaccgtacatttgtttattttggccgttaccaccgctattggccttgaaatggtgtttgtaacggaagtccattaatgttcgtaaaccttcgtctacgactaaaatgacactaccgccacgaccaccatcaccaccggctggtccgccaagtggcacaaacttttcacgacgaaatgcaaccgcaccatcgccgcctttaccagctttcacatcaattttgacttgatctacaaacattattttgactccttcttgttctaaacagtaccttatatactaccgaaatttagaccaaaagtaaacagacaaccgtcagaacgcaaaaaagaatgggcattttgccacattctttcctaaaacttattgattaaccggtaccaatttaaagttactccatggttttaaataacttaataggaattgttcttctggtgcaatgtggccaaccacgttgacccggccatcattgtgcatcgcttgtaaggcaatttgggtttcgcctttatattgaccataaccgacattatcaatcaaaatatcgccgcgttgaatatcaatcgtattgtgcgctgcaaatggtaaatccttataaatcacgcgagtcatggtcgaccgcaatagatattctgaacgatcaccccggtagctatggagactttcaaataagacttggcgttcatcagccgtaatatcggccgcaacttcgatttgaatcgctggatattccgcattgaaaatcgtttgcatcgtctttaattccgcttcggaggcataggcattcccgacaatgatgtcgtcgatgttatccattaatagataatgtttcatctgcgttgcgattggcaaatcacgatcagcttccatcgttggtaacccatcttgcgttggccatggtccgaaagtcgcttcgtgtgaatttacaaacgccgccgtattaaggttgtattgggcaaattgggccgtgcattgtttaaagaaatcttcccctaaacctgaataacgatgcggataaaaattatgacagcctaataagttggcccgtttaggcgagtaactcataatattatcaacgtaactcgttccttggctcatattaatttcaatttttaaatcatatggattacgcgtcatcttagcttcttcagcacccgtaaagccgttatctagccgaatgccccaagcccctaagtcgtggaaaaaacttaaatcatcatatgaaatattgagttgtttgaataaaccgggattaatatcgatcataacttgcatccctaattgattcgcatattcaacgacttttttaaaattggccaaaaccgctgattgatcaccggtcacttctaataaagaagtaaacacccgttggaacccgtattgatgtgctaacgctaaataggccgcatccttgtcaaatgttgaccgttctggataaatcgaaatgcctaatttccccatgaatagaacctcctaataattgggctataccaccctgttaactattattttagcatatcactagcgcttttgaaagctcttacattgtttaaacaactggtctagcccgttaaatcaggcgaatgacatcttccgattgttatttaatatttcggtctaattctaaaaatgattgtttttgaacgtttttggaatattttgattgatttaatttgaaaacgatgtcataatgattttacggaggagatcattatgctaaccgaagaaagacaacaattaattatcgaacttttaaagcaacaagaagtcgttaagatgaaagcgctctgccaattattaaaaacatccgaatcaactgtccgtcgagatcttcaacttttagaagaacaaggactactgtttcgcattcatggcggtgccaaacgcatcaataccttgcaagaagaactaggacaaattgaaaaaaccagcaaaaacgttcatgagaaaactggaattgcgcaattggccgcttctaaaattaaaacaggttgtgtcatctatctcgatgccggcacgacaactcaggccatcatcccctatttgacccccgcaatgaatctaactgtggtcaccaatggggttgatacagcttcattactagctgaccatcagattcaaactttcttactcggtggtcgggttaaaaataaaaccaaagccatggtcggcgcggctgcactcgaagccttactccagttccaatttaatcaagcgattctcgggacgaacggcattgatttagctgctggtctcaccacccccgatcccgaagaagccacgctcaaacgctttgcgattcaacaggcgaaccaaacactggtcttagcggaccacactaagtttgaagccgtttcttttagcaaatttgcccaattagaacaagtccaactgattaccgatcaactaccggcaaccattcgacaacgctatcaacaacaagccaatattcaggaggttttatcgtgatttataccattacggcgaatccatcaatcgattacgtcatccaactcaaccaattaaccaccggccaagtgaaccgcgtcaaatcagacgtcaaacttcccggtggtaaaggcattaatgtctctcgtattttagcagccttagacctacctagcacggcgctcggttttatcggcggttttaccggtgaattcattcaacaacaactcaataacgagctcgttgattgtcagtttacgcaggtccccgctgatacccgcatcaacgttaaaatcaaagatgcggttgaagaaactgaaattaacggtcaagggccagcgattccgactgcagcagttgacgcgcttaaagcacagctcaatcaattaaagcccggcgatatcgtctttatgtcgggtagcttgccccctaacctcccagcttcattctataaagacctagttcctttaattcacgaacgccaagccgaattcgtgattgatacgaccggtcaagcattactggataccttagccgatcggcccctcgtgattaaacctaaccaccacgaattagcggaattgtttaacacgacctttgcggaccatcaagcaatcatcgccgctggccgtcaattactgaccaaaggagcccaacatgttttagtctcaatggctggcgctggcgccttactgatcacaccagaacacgcctacttaggcggcacaccaaaagggacagtcattaattcggtcggagcaggcgattcaatgattgccggcttcgttggcacattctcgcaacaccacgatgccttggccgcttttaaaaccagtttagcttgtggcagtgccacggccttttcagaagatttagcgacgaccgctaaaatcaacgacttattaccccacatcgaaatcacacaaattgattaattaaccatcaaaggagaccaattatgaatatccaagacttacttttaaaagacgtcatgatcatggatttacaagccacgactaaagaaagcgcggttgatgaaatgattgctaaatatcaagcggccggcgtcattacggatgctaccctctatcgcaaagacatcctggctcgcgaagcccaatcttcaaccgggattggtgaagggattgccatgccccacgcgaaagatagcgccgttcaacgtgcgaccgtcttattcgctaagagtcaaaatggcgttgaatacgacgcactcgatggccaaccggtttacttattcttcatgattgccgctccagaaggcgctaataatacccatttacaagcgttggccggtctttcatcattattgattaaaccgcaactcgtcgccgatttaaaacaagcccaaacacctgacgacgtccaagcactcttcgctaaagcccaagcggctaaagatgccgaagacgctcaagaagcggaagcagaacaagcacaaactgccgttgccactgatgacacgaaacccttcatcgttgcggtcaccgcttgcccaactgggattgcgcatacttacatggccgaagccgcattgaaggaaaccgccgctaagatgggcatcgacatcaaagttgaaacgaacggttctgaaggcgtcaaacaccgcttaaccgccgacgatatcaaccgagcgactggggtgattatcgccgctgataaaaaagtggaaatgccccgttttgatggcaaacatctcttaaaccggcccgtcatcgatggcattaagaaaccacaagaattgattcaaaaaacattggattcagaaggcactatcttccacgccactgaagcggctactggccaagaagccgatgccgacaagaaatcattgtggagtcgcgtttatcaggatttaatgaatggtgtttcaaatatgttacctttcgtcgttggtggtgggattttaatggccatctcgttcctattggaacaaacggtcggcgcccactcaacaacctttatcttcttaaactcgttgggcaataacgcctttaacttcctaattccagttttagccgcttatatcgcgatttcaattggtgatcgccccgctttaatgcccgggtttgtcggcggttatatggccagtcaagccactgccagcgtcttatcgtctaagagtcctgctggtttcttaggtggtttagcggctggtttcatcgctggttgggtgattgttggtttaaagaaagccttcaaaaatctgcctcaaacgttagacggtttgaaaccaattttgattttccccgtcctcgggttactaattgttggctttatcatgttcttcatggtcaacccaatcttcgcacaaatcaatctctggttaagtactttcctaacccatttaggagccggtaacgccttgctgttaggcgccctcctcggtgggatgatgtccgtcgatatgggtggtcctttcaataaagctgcttatacctttgccattggggtcttcacggccactaaagacggttcattaatggccgctgtcatggctggtgggatggtgccaccattggccattgccgttgctgctacgttattcaaaaataaatttaccagtagcgaacgcaaacaagcctttgccaactatgtcttagggctatcattcatcactgaaggcgcgattccattcgccgcaactgatcccttacacgtcattatctcaagtgtgattggttcagcgattggcggtggtttaacccaactctggggcattaccgttccagcaccccatggcggtattttcgtcgcaccactcgctaatcacggtttattattcgttttagccgttctcatcgggaccttcgtcagtgctttaatcctaggcctctggcgaccagttgctaaagaaatttaatggcccaactaaaaaagaagcattcgcctgaatgcttctttttttgctttctataatagtcgttgtaactgttcggcctgcacactgcgaacctcatcaaccaccactaaagcctgtgcatcaatctgcgaaatcgttggcacgattgttgccagttgtttcgccgtgcaaatcacgtataacatcggccgttgattttgactgtaataacctttggcctcaatcaccgtaatcccttgatgatactctttcgataacgtcgcagcaatttgggcgtattgttctgaaataatggtgaccgcccgtttggccccaaaccgggctaacaattgatttaaaatcaccgctgataaatacaattcaataatcgtcaataacatattctgaaatccaataatgaaaccggacggaatcgcgacaatcaaatcaaagaacaacatcgcactaccggttggaatacctaaataacggttgacgattttagcgagaatcgtactgcccgcaatggtgccctgacaatcaatgatgattgccatcgcgatccccattaaaaccccgccaataatcgttggaattatggtttgcgtcgtatgataatgaatcagccgcggtaatttcaaaaagatggagatccaaaagaccgcccagactgaatagccaatcgtgattttatctaagaaacgaatcccaatgataatcaaaatcccgttcaagacaaagttggtcaaagccggtggaatcgctaatgcatagtagccaagcgcagttaacccggtgacgccaccttccccaatttgatggggaattaagaaatcattaattgccacagcgtaaataaacgcccctaggataatccccaaactattcttcaccacttgttttttcatcaacgtcacatcccgctcccaaattacctttagattatcataattgacacgacaatcacaacccaaaaagaaactatgacataagtcttagtattctaatattaagtgaacatgcttcttcgacgcgcgccagaactcatcaatttccattcaaatcaaaataactgattatccttagttcgggataatcagttatttcaacttgatacttaattgataatcaagttctgtcacagcttttttttgcatttatagtgacagtttaatcgtttgtgcaaccgtctttgaaatgcctaacgcttcaatctcgtcgaccgtcgccgctttaatgtgttttaaggaaccaaattgttttaataacttcgtccgggtttttggtccgaccccttggatatcatccaacttagaacttaacgaatttttaccgcgtaattgccggtggaaagtaatcgcaaatcgatggacttcatcttgaatccgggtcaataaatagaaaccttggctcttcggatccaaatcaatcaattgatccgccgtttcgccgtataacaacgaggccgttcgatggtgattattcttaaccattccggcaatcggaatagctaaatccaattcgttgatcaagacgtctttagcagcgttgagttcaacaatcccaccatccatcaaaattaaatcgggcaacggtttaccttccttcaataaccgcgaataacgccggcgaatgacttcacgcgtattggcatcttcattggccccggcgcgctccggtgtttccgtcaatttatatttgcggtataacttcttttcagcgcgaccatccacaaaagtcaccagcgccgacactggatcagccccttggatatgggaatgatcaaacgcttcaatcacgtggccattcggtaaccccaacgctgccataatttcattctgggcgccaatcgtttgccgattatcgagttcaagtaatcggaacttctcttctaacactaaacgactattcttctgcgccaattcgagtaacgcctttttttcaccacgttgcggcgtccgaatgggcacctttagaatatcagataggaccgctttttcaacgccagtcggcaccaatatttcacgcggtaaaacgttattcttacggttataccattgtaagataaaggtcgctagctcttcttccggcgtactaacacacggaaataagcgtttttcacgacgaattaaccgcgcctgccgaataaagaagatttgaatcgaaatccaacctttatcgacataaaacgcaaataaatcgcggggcgtattatcgttcgaaataattttttgcttttcaaccgtcgcttcgatgtaatgcagttggtcgcgtaattcagccgcccgttcaaattgcatctcgctagccgccgttgtcatcttcgccgttaaattctttttaaccggatcgacttggccgtttaagaagcgtttaatcgctttgatttgcgttgcgtacagactctccggaacttctttaaaacaagcacctaggcactggcccatgtggtagtacaggcaaggacggccttgatgcccctgacaacgtctcaagggataaacccgttgtaagaagcgcaacgtttcttgggcggcatagacgtcgggatacgggccaaaataaaagccaccatctttcttgacttctcccgtaatcaacagttgcggatcgcgttcattggtaatcttaatatacggataaccggtgccccgctttagtttaatattataatacggctggtgtttttgaattaacgtaatttccagcaaaaaagcttccttattcgtcgacgtaatgatggtttcaaagtcaacgatttcagaaactaatttggcggtcttcccttcatgactactcttgaagtatgaccgaacccgattttttaaatttttagctttcccgacgtagataatttgggcgttgatatccttcattaaataacaaccgggcaaagctggtaataatgctaatttatgttcaagatgttcacttgccaaaaacacaccactccttaatccaaaacaagtgttcgttctttcattttacgtgttttcggctaaaaagcaactttaacgactattgtgctaggacttgtgctaagaactgttgggttcttggttcttgcgggtgatcaaacaattcttctggtgtccctttttcaacaatttggctatcggccatgaaccagacctcatcagccacttcacgtgcgaaacccatttcatgggtcaccacgaccatcgtcatgccttcttgcgctaaatcttgcatgactttcaacacttcaccgaccatttcgggatccaacgctgaagtcggttcatcgaataacaaaacgtctggcgacattgccaatgcgcgggcaatcgcgatccgttgtttttgaccaccggataattgattgacataagcatccgccttttcggataagccaacccgttcaagtaatgcttcagcctgtttcgtcgcttcggcagcactttcttttttaaccttttggggcgctaatcgtaagttatccatcaccgttaaattcggaaaaagattgaaattttggaagaccatgcccattttggttctaatctgatccaattctttttcagacaacgtcattaagtcagtgccttcaaatagaatctgaccaccagttggttcttctaagcggttcaaacaccgaagtagcgtactcttaccaccaccagaggggccaatcaccacgattacttggcccgcttcaacgtcgccactaaccccgtttagaactaaattatcatcatattttttaacgagttgattgattttaagcatgttgcatcttcctttcgatataattcaataattttgaaagactaaaggttaggacgaaatagatcagcatcgcaacaaaaatcggtgcgacccctttatacgtcgctgattgaaccactttcaattgatagattaaatcagtgaccccaataattgaaacgattgaactttccttaattaatgaaataaattcgttgcctaatgctggccaaatattcttcaaggcttgtggcaagataatataccgcattgtatcatgttgtgaaagtcctaaacttctcgacgcttccgtttggcctggatcaatcgcattaatcccagaacggataatttcagcgacgtacgcagcactattcaaggaaacggcaatcacaccggctaataacgctgggatattaatccataagccaattccgaaatagacaaacataatttgaatcatcaatggtgtgccccgtacgaattcaatgtacatcaccgctaaaccatgcatgaatttattcttcgaaatccgagcaaaggcgagaatcacaccgattaaaatcccgattgcgattgacacaatcgtaatgaataaggtatagccaatccctttagcgaaataagaccaataatgccacatgctcgtattatgcgtgtttgttttcattaatttacccgcatttttaagatattgcggaattaatttttgtttcttgatttgcgcaatactttgattagctgctgaaactaaggttggcgaatttttagggaaagcaattgcagaaccttgcatatccgcccctaaatcgaatttcccatcaattctaaccaattctggatcattactggcataagcggttgccactggtgtttcggcgacaatcccttcaattttatggctcttgagtgcgagtactaaatctggaaccttggttaaacccgtaatttgggcatttttaatttgttttttagcaagtgtttgttgtaaactccccgtttgaacccccacttttttaccgatgaaactgtttttagatttatagattttcgcatcggccttattgactaagatcgattgtccaccgagatagtacacgtcggagaaatcaacactctttgaccgttcatccgttggtgacattgccgagatgaccatgtcgactttcccagtttcaagcccgaccaacaatgcatcgaaatccatggatttaacgactaatttgacgtttaaatcatcggccagcttttgggccacttgaatgtccatgccgacagtcttatttttgccgtttttattcactaaaaattcatatggtgcataatcaggactcgttcctaggactaacgttttcttggcctgaacttggctcacggtctgacctgccgctgaaactggttgattattgctaatcattacccccaacaataacattaaaggtaacattaatatcattaacttcttcttaatattcatcctaactcctccttcgatttttcctataatacattaagataaatatttatgcaacatttatttatataaatgtttaaaatttgcgaattaatgataatctggtatgatagatgcaaatgagaaaagaggaatttcaatgagtttaacagtccaccgccaaaatgatttaaccggtctattcgataaatttgcttccgttcctaagaaagaacaaccagtcgttaaaaaagaagacgaaacagaaactaaaagtaaatccgatgacgatcaaaccgcacaaaaaaagtagacctcacttggtctacttttttaataccgaatattttatttagcgtgccgttctgggtaacgcttttttaattgttcaatgttatcttgagcgacttgttcgaaatcaacattgttccactcggcgatttgtgataaataccaaagaacatcaccaatctttttagttaagattttttcatctagttcgtgaccttggaaggtgtacttcttaacaatatcgacgacctcaccactttcactggataaccctaacgctagattcgtcagaacctgttcattaccgtatagcgttcggttggctagtttttgatattcattaaattccattactgttgacctccaatttcacattgacgttcaatccattcccaaacttgttccttacccgcaccggttaacgcactaaagctaacaaatttatcaactgggttaaaatcgagtttttctttaataattttttcttgacgattccacttgctcttagaaattttatccatcttcgttgcaaccaccaaaacgggcaaatcataatatttagcaaagacgtacatcgcgacgtcatcttcggtgggttcatggcgaccatcaatcaatgaaatcaatcctcgcacgttttgacgcgttgtgagataagtttcgataatctgaccgaacttctcccgttgcttcttagaaaccttcgcatagccgtaaccaggtacgtcgacgaagtagagttgactttcaactttgtaaaaattcaacgtctgcgttttaccgggtttactggaggtccgcgcataacttttccgattgattaatttattaatcaatgatgatttaccaacgtttgaccggccagataaggcaatttcaggtaactgatcagttggatattgggcctctgagaccgcactcataaccatttcaacttcttgtactttcataatgacctccgattgtttgcttcgatagctagtttagcataaataaaattttattgcgccgttgacttctctgaatatccatgtttagggtcacaaatcaaaaaggttgctgacgcttaacccgccaacaacctttatcgaattattttatgacgcttcttgaccatcagctaagaaaagttgcggttgaccagtaccttcaacggcttctttcgtcactaagaccttcgcgatgtcctcgcgacttgggatatcaaacatcatatccatcatgacttcttcaatgattgaccgcaatccacgggcacccgtatcacgttcaatcgctaaatgtgcaatcgcgtggagggcgttttccgtgaaatcaagttcaacatcatctaatgccatcagcttaccatattgtttaacgagtgcattcttaggttccgttaaaattcgaaccaaatcatcttccgttaatttctccaaagcagctgtaatcgggattcgaccgatgaattcaggaataatcccgaatttcattaaatcttccgtgccaatttgttgcattaaactttgtttttcatcgatgactttgccagctttactaccaaaaccgattgtcttttcccctagacggttcttaacaatggtttcaatgccgtcaaaagccccaccaatgatgaataagatattagtggtatcaatttgaattaactcttgttgtggatgcttacgcccaccctgagggggaacgctcgcaatggtcccttcaagaatcttcaagagtgcttgttgaaccccttcacctgaaacatcacgggtgattgagacgttttcactcttcttggcaatcttatcgatttcatcgatataaataatgccccgttcagcacgatcgacatcgaagtcagcattttgcaataacttcaacaagatattttcaacatcttcacccacgtaccccgcttcagttaacgtcgtggcatccgcaatcgcgaatggcacgtttaaaatccgcgctaaggtctgagctaagaatgttttacctgaaccagttggtccgattaaagcgatattactcttttgaagttcagtatcgcctttttcagcaacggtcatttggttaacccgtttgtaatggttataaacggccactgataatgcttttttcgcttcagtttgaccaataacgtaatcattaaggatcgctagaatttctcttggttttggcacttctaataaatcattaacggcttcatctttgaattcttcatcaataatttctttacataaatcaatacattcattacaaatgtaaacgccagggccagcgacaatctttttaacttggtcttgtgatttaccacaaaacgaacaagtgactgggccagttgttgtttctgtatcatctaacatcgtaaaatgatcccctttcctatcttcatcatagcaggtttaaaaaaactgtcagctacaacgacttgaaatcgtaattaagactataacatagtttattcagaagtcacagcataacgccttttgcttaaaataacgcaaaagcgggtccaaagtaagcaccttgaacccgcttttagaaccgattaaagctcacatcgttattatttagcgtctttaacttcgacagctgaatcagtaatcatgtcaattacttttttaacaccgatatcatgtttcaacatatcgtctgaaagaacgccacgaacagctgattcttccatcttatattgtgttgctaattctttaatttcagcagcgacttcttcgtcagttgcttcgattttttcagcagccacaattgcttctaaaacaagatttgttttaacgtgtttgtcagcatcgccttcgaattgtttcttcaaatcatcttcagttgtcccagtgatttggtagtacatttcaggttggataccttgttgttgcatgttacctaagtattgttgtagttgcgtattaacttcttcgtccaacattgcttgaggtaaatcttcgattgttgcattttcagttgcagcagcaacggcagcatcttggatggccgtatcagcagcatcatttttttgttgttttaattcttcacgaattttttcttttaattcgtctaatgaatcaacatcttcatcaacgtctttagcaaattcatcatctaattcaggtaattcctttgctttgacttcgtgcattgtcactttaaagattgcttctttatcagctaattcttcagcttgatagtctttagggaatgtgactttaacttcaacttcttcgccagctttgtgaccaactaattgatcttcaaaaccagggatgaatgagtttgagcctaattctaatgaatagttgtcggctttgccaccgtcaaataattcaccatcaactgaaccttcatagtcgataacaactgtatcgccattttcagcagcagcgtcttctttaagcactaattcagcttgacgttcgcgacgtgtttcaagttcttgttcaacgtctttgattgtaatccgacggctttgttttggtacttctaaacctttgtaatcgcccaatttaacttctggtttaacgattactttagcagaaatcacccaagcagcgcctttttccattttttcaacattaatttctggttgatcaactggttgaattgcggcttctttaacagcagcatcataagcttctggtaaaacagcgtttaaagcatcttcataaagggcttcttcaccatacatcttgttaaaaatttggcgaggcatcttacctttacggaaaccaggtgtgttgatgtttttacggacacgtttgaacgcaacgtccaaaccttcactaattttatctaaatcaatttcaaaggttagaacaccatcattggtgccctttttttcccattttgctgacataattttcctccgacagttatattcacaatttatcaattgcatacttaattagcataaactatttgcttggaattgtaaatatttatcctcataaaatccctattttagtgaatttatctcgaattttgaacacaaaaaaacccgaagcactagacttcgagttttaatatttaactaattaaaaattagtcaaggatttcgcttacgacaccggcaccgacagtacggccaccttcacggacagtaaacttaagacccttttcaatagcaactggtgagattaagtctacagtaaatgtaacgttatcaccaggcataaccatttcaacgccttctggtaattcgataacaccagtaacgtcagttgtatggaaatagaattgaggacgatagtttgagaagaatggtgtatgacgaccaccttcatccttgctcaagatataaacttcgcctttgaagtttttatgagtttggattgaacctggcttagctaaaacttggccacgttcgatattttcgcggtcgataccacgtaacaatgcgccgatgttatcgccagcttggccttgatccaatgtcttacggaacatttccaaaccagtaacagttgtcttagcagcttcttctttcaagccgacaatttcaacttcgtcgccgacgttgattgtaccacgatcgatacgaccagaagcaacagtaccacgaccagtgatagtgaaaacatcttcaacaggcattaagaaaggcttgtcagtttcacgttctggagttggtacgtattcgtcaacgatatccattaattcttcaacagctttaacatcatcagggttatcgtttaaagcaccaagtgctgatccacggacaacaggtgtgttatcaccatcaaagtcatattcgtctaataattcgcgaacttccatttcaactaagtcagttaattcttcatcatcaactaaatcagttttgttcaagaagacgatgatgtaatcaacaccgacttggcgagcaagtaagatatgttcacgtgtttgtggcataggaccatcagttgcggcaacaactaagatagcaccatccatttgtgcagcacctgtgatcatgtttttaacataatcagcatgtcctggggcgtcaatatgtgcataatgacgtttttctgtttcgtattcaacgtgggcagtgttgatagtgataccacgttctctttcttctggtgcagcatcgatgtttgcatagtcttgagcttctgccaagcctttacctgctaacatctttgtgatagctgctgttaaagttgtcttcccatgatcgacatgtccaatagtaccaatgttaacatggggttttgttctttcgtaatgtgctttttctgccattaaaacgaacctcctgtattttcgcaagaaaaaatcagcggataaattccaatactgataatcctttacataatattataatacttcgagcgccaaaagacaaagtgtttttttgacacaaaaagaattcaaaaatgattatatctgctatttgcacgtttgtaaacacttagcgcttaaaaaaagcgatatttctaattttaaggtgcattttctcatttaaaacattagtttagccactaattcttgcaatttcgaaaaccaagcttgcgaattttctgaaactatcgtggcctgatttcctggaactaaccccaactcttgtaaaaaaagcgttgtccattcatctgaatcgaccaacacttcattttcaaacgggtataaacaagctaaatagagttgacttgtcaccaagacctgttcagcaaagatcggatcatccgctaacgtttgttgaatcgcctgttgaactgcctggattttcggactcgtctccattaacgggatttcattgggaatagcggtcttcacctgatcaaaccaaaatacagcaatcggctgcgctatttttaacgtgactaattcttcaaaaatagtactgcgcacgaatggatgcacgtacggattaaccaataccggttgaatcccctttagatattcggcttgtggtaactgtttagccaatttcagcagttgcatctgttccgtcaacggtaatccagcaatactataaagtttttgttggattttatcgattgccggcacctgttgttctcggtaccgattctgcgcgcgttcaatgctccgttttacggtttgccaaaatacgcgttgtttggcgtcctgttgcatttggggccataccccttgccagagctcgttagcctcaacaaactccttgttcgccaataaaacggcaatgtagaagccaatcagatctggttcagccaaatagtcggcgaccttctcttgcattaattgcaaagctgccgctagctggcgattttcaaccaacacacttgccaataaaatatttaaactaaaacgttgttctaaagcgtacgcggcttcaaaatggtcaatcgcagtcgcccaattttgttgattggccgcctgcttcccgagttgaatatgccgttcataattacccggcagttccactgtctcacccatcgactcactccccacttttattattagaaaaaaagccgaattaatattcgactttttacgtttattccgctgatttagcaggtacttcttttacgggcgcttttttaacgtcctttttttgacgacgatgattttgattgatttccataatcactggtaaaatcacgggccgccgttttgtttgttcatacaaataatggcttaaattttcccggacatcctgtttcaaatgactccagtcaaactctttgttatccaaattattctgaaccgcttgtttaatgatttctgaactttcagccatcaaatctttgctggttttaacgtagacaaatccgcgagcagtcactttaggatcagcaatgatttttttatttttacgatcaatggtgacgaccgcaataaaaatcccatcttctgatagcaatttacgatcacgcaagacgatattaccgatatcgccaataccactaccatcgatcataatatccgttgcgtctacttgaccaccaacgtgcatcttaccgttgtcgtagctcaagatatcgcccttaccgacgataaagatgtccttataatccattcctgtttcatgcgcaatatcggcatgcgccgctaataaacggtattcgccttgcactggaattaaaaattgtgggtgtaataaattgagcatcaattgtaaatcgcccttgttcgcatgaccggacgcatgtaaatcatcaccaacggctttgacttcaccgccagcacgataaatcatgtccttagtcttggccaaaatagtttccatggcgtgtgaaggtgacgtcgttaagtagaccaaatcgccctcttcaatgtgaattaaacgatgatgacttgtcgccatcttttgtaaggctttaatcggttcgcccattcgaccggtttctaaaatcaccgtttgttcgggggccaacgtttctaggtctttcggttgcactaaaatggcttcatctggcaaaataatcatttcgagtttcatcgccgtccgcacaattttttctaaatcgcgaccggttaaaacgactttacgccctgttttataagctgcatcgatgacttgttgaatccggacaatgtttgaagcgactgacgccacaataatccggcccgtttgatatttgaaggtttcaaaaatggattcctcaatatcaagttcgctagccatcgcataaggtgattcggcattagctgaatcgctcagcaacgctaagaccccttgcttgccgatttcagctaaacgcgcataatcggtttgatacatcggttgtgcggattgatcgaatttaaaatcacccgtataaacgatttgaccttcatccgtcttaataacgatcccgagtgaaccgggaattgaatgggtcgtcttaaagaatgacaccgtcgtactgtcaaaatcaatcgccgtattggcattaatcacgtggaaattctggaaacgacgcaacttaggttcgctgctgaccgtaatcttcgctagttcaatcgttaattctgacccaaagacgggcacatcgtgttcttttaagaaataaggtagggcgccaattgcatcgacatgaccatgcgttaagaaaatcccgacaacccgctctgcattttcttccaaataagtcatatccggaatgacaatatcaatccctaataattcagtttctgggtatttcaaaccacaatctaaaatataaatctcatcattgacttcaaccacgtttaaatttttaccgttttcacggacgccgccaagcggcataatcttaatgttactcattctttcacctctatgaaattgaaaggcacgcctttcaaactattcatctatttttttaaatttttcgtttaaaactcatccgctttaaattctaattcatattttatcacaatttaaacaaacaaacagcttttgattactaaagacccactcaatgaggcccacactttaaaaaaggcaaaaaaaaagccacccgattgggcgacttcttaagtaaattaacgacgtaagccaaggctcttgattaattcacggtaacgttgaacatctgaatcacgtaggtaacgtaaaaggttacgacggtgaccaatcttcttcatttgaccaacatatgaatggtgatctttcttatgaacagataaatgttcgtttaaggcgttgatttctgcagtcaaaacagcgatttgaacttctggtgaaccagtgtccccttcgtgacgtgcatattgtttgataacatcgttcttagtaatttgtgaaatagccatgctaatttccacccttcaattatgatagcccgaaacagcgtaaagcgtcgggtgaacgtcgctaaacgatgtaacaggttccgtgcgaattgcactacatcactttactaaaaaaaaacgataaaagcaagccatcattctcaaaaaaattatgcagtcaagttgaaatactttacaacttagtattgcaatcagtctcatttgtttggtataataacgtctgttgaaattaaaaatctttttttataaagatagtgaaacccatcggaggtgaaaccatgccacaaattaaatctgctatgaaacgtgttaaaacaattgaaaaagcaaacaacagaaacgcttcacaattaagcacaatgcgttcagcaatcaaaaaattcaaagttgctactgaagaaggtagtgaccaagctgcagacttattgaaagctgctactcgcgcaatcgatatggctgaaactaaaggcttaatccacgccaacaaagctggccgtgacaagtcacgtttaaacaaaatgatggctaaataatttttgccaatattcaaataggctaccgacaatcttctgattatcggtagcctatttttttaggccgttttttgcgcagcaaactgtaacataaagagttcaaataataaggctggttgcccctgccccgttttgattttaacttcaatgtcttctaacccaagataagcagctgccaatgtcggcttcgaaaaatgtttaatttgttgcatcgccaacttaatccgatacggatggatttttaaaacgctggcgagattgccctgactataccctttttcgaatagaattttaacttgcagcaatagccggaattgccctaaaagaatcgcattaatctttaagggttcctctttttgcagcactaattcatgataaatcgtcaaagccggaccgacttttttctgtaagactaacggtaccaattcaaaaacattattttcaatactgctggcgactaacgtattgaccgccgccaccgtaatctcgcgtgtttgagcggcgtagagaattaattttggcaattcggccatcatctgactataatcgccaccggttttgctgactaacagttgcatcgccggtgcctcgatcgtcacattttgcgttttcaaatactgccccaccagttgctgtgcttgatgatccttaactttttggacatcaacaattgtggcgctctttttaagctgcttgactaattttttccgttcatccaacttaggatacggcgcaaaaacgaccaatgtggttgtcggttgtggcgtttcaaaataagtttgtaagctcgctaaatcatgatctagtttatttttagttttttcacccgttaaaaaatacggattttgcaaaaagactaagcggcgttcaccaaaaaaaggtgccgaacccgcatcgtcaattgctacagcgacctcggtagccgctaaatcatagctcgcaaaattcatcgtgagctcttcagccggtaaactttgtttaaataattgacgtacctcttcaattaacgcttcttcttgccctaaaacaaggtagagtggcgccaattgttggtgttgaatcgctgtttttaattgttcaattatcatcatttacccaatcctttatcgttgttttaatttgactattgtcgctatccagcaagggtccgtaacaccattcaagcatccctgactgcgcggtcacccaataaggcactctcgcttgttttaatgttttaagcgtgacttcgtgcggatgttgataacggttatgtcgaccagccgaaatcaaggcgccctttggttttaaccgttgaacaaaagctggtgcagttgctgtttgactcccgtggtggcccacctttaaataatcgaccgtaagctgcggataacgtcttaataggtctaattcaccggcttgctccaaatcacctgtaaacagccaccgtgtcccttgtaaattagtcgtaatcactaacgaatccgcattagtcccattacccgcagtaactggtgctaaaacagaatagacttgccgaccgattttaaacgactgatccgccaaagttggcgttaattgaatctgattcaaatagggcttaatttgccgttgaaattgttgattttccggtaaccccgccgcacaaatcacccgatcgaccttgattttctgcaggagttgacccaaatcaccaatatgatcggcatcttgatgcgtcaccgcgaccgcatccaaatggtcgatgccttgactatacagataattaatcgtcattttttcgacgcgactcacttgatagcgtttctgccatttttcctgtggcaattttaaccgaccacccgtatcgattaataggtggtggcgattaaacggctgttgaatcagaatactatccccttggccaatatcaaagacaatcacccgaccgattgggttaaaatgaatccccaaaaagctgagaccgtacaacaggattatcccacgacgtaaccgacggcggacggctggcgctactgtgaccattagcaataacgtcaaaaccagtacgcctaatagtggcaataatggtattttaccaaacgtcacggttagatacggcaacgtggccaaccaatctaacaactggtaaagactccgcaagacccagtcgcagccagcaactagtggtggacaagcaaattgtccgataagtgctaaaccgactaagctcaatacaaccggtaaataaattgggaccatcgcgccattcaccaaaatcgttaacaaatgccagcgataagtataccgtagaccaagtggtaagctgattagattcagccaataacacaccttaaaattagactgaccttgcaagtagatgagtgcaaaagccatcaaataactgagttggccccccattgattgcaaaagatacggctgccacaacaaattcagtcctaagacctgactccaactatctaaacgcgattgccgccagtggcactcttcacagagcagttgcaccatcattaacccaatcgcacgactaacactcgttccgttaccagtaaacacagcatagaatggcagactgaccagcaacaatcgattcataatctcgcggggaattcgacaataagtcgcccccgcgcgcactaatgacagtaagtaaaaaacgtgtaaaccagataaactgagcagatgaatgacccccaagcgacccagcgtctcttgatactgcgttccttgttgatcccgaataccaagcaatagcgcttgcgcgtgaaaacttaacgtcggcggtaattgtgctagtctaagcgcacacttttgacgaacgctatgtaatcggtcacgccaattttggggctcaattagttgtaaattctgctccggtgacacctgaatttgataatggcaatctttttgttgcgctaaaaaacgggcgtaatcaaattcattgcgattggtcgcacgttgaactggttcaaaatcaaagtcaccagtcaatatgattggctgccaattcgtgcgccaacgtcgttgttcttgacgattctgacaacgataaaatccagaaaccacttggtgatcgatttgactggtcgccaaaaaacggacctggtctcccgccacttgaatgtcatccggttgaatcttaaaaacctgttgatctggcggtcggcgtgttaaatccgattgcagttggcctccaaaacggacaatgccgcagattaataagccaatcgtcatcccaataatcattggttgtcgcaaaacactgattctgaccaaccacaataataataagcaactactaatcaggcgatactgaccaagcaaaaccgcgttgagtaaagctaaacaaataactgggtaaacccagttatttctcattcagaagtctgttcgttctccaaaaaattaactaatgtattggcatcatccacggataaattaacctgttcaaccaccacacctgatttttccaataactcgtaggcatacggatcattatggtaatccttttgatagtgaatttggctaatccccgcttgaataattaatttagtacattgtaaacaaggaaaatgagtgacgtaaatctcagcgccgtctgtttggaccccaaatttagcacattgtgtcagagcattcatttcagcatgaatcgtccgtaaacagtggccgtcgcgcattaaacagccgacatcgatacagtgatcttcatgagcgacggagccattatagccccccgcaataatgcgtcgattacgaaccactaatgcgccgacgaacaaacgtggacacgtactacgcatcgataatagcaccgactgtaacataaaatattgattccatggcattcgcttatctgacaccatcattccccctaaaaatataattagttctcattatagcaaattttacgtcaatcggacctattcaacacaaatttgcgactgtaactgttcaaaagttttcgggccaatcccgccaactttttgtaattcttcaatcttctcaaattttccttgttcatcacgatacgcaattatttgttcagccttcttcggcccaataccactcaacgtttgtaactgagcactgtcagcttggtttaagttaattttggcactgatggtcgattcattcgttgccgttgtcggttgttctgtcgttacttcttggccaccgctagtctcaggatttttgattaattctgcggcctcaatcgcctcccctttgcgtggcacataaataattaattgatccgtcaatttctgcgctagatttaattgactcgtttcagccgcttcagtcacatcgcccgcagccttcagcacgtcaaatagccgtgtttgaccaatctttatcggataaatgcccggatggttcaccgccccttttaaatcgataaagccaccttttgccggttgctctgactggttattttgcgatttaggttttgcagacggttgcttttttgatgatgctccttttagtaattgttggttctcaacgcgttggtgcgctgtccgttggtgtcgcccccagagaccacccccaattaagattaaacccacgattggtagccaccaaaactgacgccaacgttgccaattaatcggccccatctcatcacctccctatctataattacccgaaacaatcaaaaaagtccgctgattaatcatcaacgaacttttactggttattttaaataattgagggcatcgtccaacgttttgactgggacgattttcattttagttttaatctttttagcagctgctttggcaattgcgtagttattttgatagtccggttcgactttcaaaatggctttagtgaccggatcatctggggcgaagaacaccgtggccccttcttgactggcgactaaaactttcttatcaatcccgccaattggtccaactgtgccatcgggagcaatcgttcccgtcccagcaatcgtgcgaccggttaataatgattgattggttaactggctataaatttgtagcgtaaacatcaagcccgctgacggcccaccaatttcacccgcatcgatcttaaccggcgtttcggtctcaatttctgaatgatcggttaacgtaattcctaaacccgcataatgcgttttaggcagcttcattaaccgctgagtcgcctttttagcgtgaccgttatgctggtacgcaattgtcaccttttgacccacttttaaaccttgcacgtatttaacaaaaccattggcgctcttaaattgcttttgattgatggccgtaatggtatcgccgactgctaactgctttttaaaagtcgattgctctaaaatagacatcacgtacacccccatatacttggtggtgtatggtttttcagctttcttataagccgcctcaaccgcactattaatcgagctgtccatataatatttttgaatctgatcataatctttagaatcttcatcgcccattaattcagcacgactcataatttcagtaaagggttgggttttagataataataattgcaaccccgttgctggtccttgaatccccactgtcgtcaataaaaagcgaccccgttgttggtcatgtttccccgcaactgtgacaaattgtttagtgggttcggccgttccagcaccttctatgtagtaatgggttggtactaggcaaaatgctagtagtagaagaatcactagcggccagataaatcgtttgaatccccgcttcttttttggcattttaatctctcttatcctgtaatttttgttttaaagcccgttcgacggctggtggcactaattgactaacttgaccaccaaaactggcgatttctttcaccatactagaagagataaacgcatattcctgtttggccaacagtagaaccgtttctagctggtcatcttgggtttgatttaacgccgcaatgtctctttcatattcgaaatcattggcattgcgaatccctcgaatcagataacgagcacccacttggcgcgcaaaatcagccgtcaacgttttgggttgcgcaacgacttgtacgttgggtaaatcagtcgtgacttccgcgattaatgccactttcgtgggactatcaaataaaggctgtttcgccgcgttagtcatcaccgcgataatgacttgatcaaacagctgactagcgcgttgaaccgtatctaaatgccctttcgtaaagggatcaaaacttcctggaaacaaagcaattttagccatcttgccacttccttaaccaataaatttaaagatggcaacttcagtaataccgtagttttgttgccgtttcaattcataatgtggaatctcttctggataaaccagcgtcgtatccgtttcgcataaaatcgtcgcacccggttgcaagatatcgagttcaacgaattgttgtaattgcgccaacatctgttgttgtttatagggtggatccaataaaatcaactcgaatttttgctgatcagttgccaatttgaccaacgctttttcagccggcatcttccaaatcgtaaaacaatccggcatctttgtgacagcgacgttatcttgaatcatttgaatcgctgcgtattgacggtccactaaaaaggcgtgatccatcccacgcgaaacggcttcaatggccaatccgccactaccagcatagagatctaacgcttggcccccatcaaaaaattgaccgagcatactaaacatggcttctttcactttgtccgtggttggtcgtgtttgcattcctgggacggcctttaaacgccgtccgccaaattcgcctgcaataatccgcattaatctaactcctctgaatctgttttttgagtgatcatttcctctggtttacccacacgggccccaaagtccatatcaatattgggccgttgtgaaagactaacccgtttaacataatgtaatttctttaatttttcgacagccatctcagcttggtcaatgtcgacatacaaatacacgtatttcatgcgtttagacgtgtaataaacaagaccgtatcgtcttaattgtttcacttgccgtaatgaatacagccatacaaccacgccttgtcgtttcgttactgtcaatgtcatctaatcagtcctttatctactatcgttgatgtggtcgccggtcaatctcaaaaaaaggattgcccgctgcgacttgaatatcggtcgaaatgctgtcagcaatcgtgatgctaatctgaccccataaattttctaaatcagttttagcttgtttaaaagcctgaattttaggttgcaagtccaacgcccgtttcgcttttaacacagccgtttgaacctgcatgaaacccggcgcagcctcaccgtaatcagcaattgccgcataacgatcacgtaaccgcgtgaaatctgcgatctgttgttgtaatgctggatcatctgccactatttgtttcgtggtctgatagcattggtagacggtcccttggcgaatcgtttgaaaaagttgcgccaattgggtttcaatggctaataaattatcatcaattatcacgttgacctactccaatactaaaattgtatgaccgttaatgtttgtcaaacgcatatgctgcaaatctggctgtttaatcacagattgtagcgcggtttgtcggttcaacactaattgcttcgtcccgagttggttcggccaaataaaaagatgactcgttggcgtcaaaccgagtgctggccacaatccccgtttaaaatcacgcgtggtcaaataccggttatccgtcgttgcttgtttaatctgccgaaaccgttgctgtccctgttttgttaaccaccgagccggtttagctttaaactgttgcataaaagcagaatcaaccggtaatgattcaacggtcaacaacggttgctgttgatttaagcgttggatctgaacatattgttgcaagatggcttgttggttctgggctgcgtcagtcacgctattatctgatacaggaatcggggtcattgaaatgacccggtataaatcagtttgtaataatgcattagcgtctaaataaatgaccgttgataagtgaccatccgccatcaccaaaatggcgtacgtgccattcttaaacgcgaccagtggatattgcttttgttgttgttcatttaactcaatctgaaaagtttgttcgtgcagtttaacttcaaaattagcggctaacgtcattttgcgtgtcacctgattaagcgtttgctgatatttaaacggggcgatactttgatcttgccccaataaaacgagctgttcaacccgattggtttgttgatcaatcgttgcttccagatattgctgagaatcgacgtgaaataaccagcgggtcgtctctgccccattatcaagttgcttgattggttgcccatagttttctattaagtccgcgactggtcgttgaatcaatttagccggaccagccgtagacaacatttgattttgcggatgcgttaaccgcggttttgttttagtcgatgccggcggtttaaccacgggtgattgcgtatcgaacacgatcggccaagcaaataaaatccctagccagatgcatagcgccaccaaccaccgccaactctttttaacccactgcatttagtgtaaccgttggtgcgccaaccgcttttcttgggcactaatattcaataccatgcccaagccggttgcaagcaccagcatgctggagcccccataactaatgaatggcaaggtcacccctgtgattggtaagattcctaatagcccaccgacgttaaagaaggtttgaacgaaaataatcgtgccaacgccataacaaattaacgtatgatacatcttagtcgcgtgaatccccagcataaatatccggataatcatcacacttaatagtcctaagatcaccaaggcccccaatacgccgatttcttcagtaatgattgataaaataaaatcggtatacggttccggtaaatacccacgtttttggatactgttccccagtcctaagccaaaccaaccgccattgttaatcgcgtaatacgaattaaccagctgactgccacccatgttttctaacttaaacgggtgtaaaaaggccaataatcggtttaacttatacgatgaaatattatttgataaattaaaatgccctagaatcgttaaagcactcgtgacgactgctgcaatcccactaatcgcaatcgcaccatatttaaatggaatcccagtcccaaaaaacatgactaaggtcaccatgcctagaatactagcgccccctaaatcgggttgtaaaaagaccaacaccagaatcgccgcgactaaaccgaccggttgtaaaaataacttgacgttatcccaaaatttttcttccaaatccttttccttacgcgataacatgctcgcaaggtacaaaacaatcaatagtttcgcaaattcagacggttgaatcgtgaagggcccgattggaatccaggctgtcgccccattaaccgctgcgcttggtcgaaagtgacttaacccgaaaagatacagtagtgctagaaaaaccacaatcgtactccacattaatagtttagaactacgtaatactgataatcgtaagaaaaacgtgaacaataataggatgaacccgattgcgatatagattaattgtttggtaaaataggcgtccggtttcaagccattgatcgacattaaatctgaactggccgaataaaccatcaaggccccaatggcgcataaaatgatatacggcattaataaccaataatcgagatattgaattttacttttttgaaactttcgccacacagttacacctaatttctactaattaattgagcgtttgcgcttgataaatttggttataaatctgattgacctgttcttcaagattactcaccaaatcattgccttcatctgccgtaattaattgaacacgtttggcaaaatcaacttccttggaaaaaccaaacatctgcgtgtcaataatttcttcgacaattggacattggctcaaacaaagcgctttgaattgttgtgttaatagcttttgaatcttatctgcatctgcttttaatgttaaataaccgaccgtttgttgttcaatcatgctaaaacccctattttatccgttattttatgaaacactctaatcagtattatagcatacttcttttacccgactataccaaaaaaggtagcccctaatgtttaggaactaccttttaactttaagttaatgaattaaccttttttacgtttcttatcagctttagtccgtgcattcgtatcaagaatctttttacgtagacgaactgaagttggtgtaacttcacaatattcatcatcgttcaagaattcgattgattcttcaagagacattgcttttggtgtcttgattgctgcagaatgatctttacctgaagcacgcgtattagttaagtttttacccttagtaacgttaaccgcgatatcagcatcacgactgttttgaccaataatcataccttcgtaaacttcaacggcggcaccaataaataattggccacggtcttcaacggattgtaaactataagtcgttgaagtccctgcattgattgaaactaaggcgccattacgacggcctggttcccagttcttaataacgggcaagtattcttcgaaagtatggttcataatcccgtaaccaccggtcatggttaagaattctgttgaataaccaattaaaccacgtgaaggggctaagaaagtcatccgtgtttgaccattggcatcactttccatgtttttcatttcgcccttacgttgtgacatggtatcaatcactgaaccagtatattcgtcaggtgtatcgatttggaccatttcaaatggttcgctcatgacaccatcaacatcacgatagataacttctggacgtgataattgtaattcgaaaccttcacgacgcatttcttcaactaagattgataaatgtaattccccacgaccagaaacaacccaagcaccagacttgtctgtatcttcaacgcgaagagaaacatcggtatgcaattgatgacgtaaacggtcttcaatcttacgagcagtaacaaagtcaccttcacgaccaacaaatggtgaatcattggcaacaaacgtcatttgtaacgttggttcgtcaatccgcaaaataggtaaagcttcttgatgatcaactggtgtcacagtttcaccgacatagatatcatccatcccggaaacggcgattaaatcacccgcttgtgcttcttggatttcaactcggtctaaaccgatgaaaccaaagatttttgtgacacggaagttcttagcagaaccgtcaagtttcaagacggcaacttgatcaccaatcttgattgatccacgagaaacacggccaatcccgatacgaccaacatagtcgttataatctaacatggcaacttggaattgtaatggttcgtcactattatcaataggggctgggattgtctttaagattgtatcaaagacaggaaccattgtatgttcttgtgaatcaatttcttcagaataacttgaagtcccattaatcgcacttgcgtagacaactgggaattccaattgatcttcatcagcacctaattcgatgaataattctaagacttcatcaacgacttcagcaggacgtgagccaggacgatcaatcttattgataacaacgattggtgttaaatgttgatctaacgcttttttcaaaacgaaacgggtttgtggcattgtcccttcaaatgcatcaacgactaataatacgccatcaaccatcttcatgatacgttccacttcgccaccaaaatcggcatgtccaggtgtatctaagatattaatttgtttgccattatacttaacagccgtattctttgaaagaatggtgataccacgttctttttcaatatcgttggtatccatggcgcggtcagaaatttctgaatgaccttctaatgtatctgattgttttaacatttcgttaactaaagttgttttaccgtggtcaacgtgggcaataatcgcaatattgcgaatgtcttctctttttttcaagtgattacgcttcctctcgctagtgacttgactagtgtgtttgtctaatgtatacaagctaatattttaccataaaaattgcagttacgctttatatattaacgaatttttgaaaatccgcaagtttttttcatgaaaatctaattattgctacgattatttctgttgcataatcgctaaaatctcattcatagcatgggctggtgcgacgaccatcccttctttagtggtcatggaaattggttgaccattaaatttcagaacttgaaaacctaaactttcggccaaaacacgaccggcagcgatgtcccacggtgctagtttagagatataagcgcacaaattacccttcaacaattgaccaaagacaatcccggcgctcccatagattcggacccctgaactgtgcataaagacccgttgcaaattcaaatcatcagccactaacatcttcgtattgaccgtgattaaccccttcgttaacggtggattatccgtcaacaacaacggtacttcgtctcggaaaacgcctagctgaggaccaccccaataaagttgatcggccatcacgtcgtaaataatccctaatgtcggttgcccgtggtcgtaaacgccaatcatgatcgcaaaattctcattctgcttcacaaaattcatcgtgccgtcaatcggatcaatgaaaaaggccaagccagattcccaatcgtcgggaacagcatcggttccttcttcgcccactaaaatcgcttgcggataatcgcctttgattttggctgctaaaaaaacttggttagcacgatcaacgttggtcacaaggtcattgggaccagactttgtggtaatttctaaaggctgtttaatctgacttcttgtgtaggcggctgcctcaagaacccatttttgtaaagattggcttaactgatacagcgcctctttttccatcctattcatctacctttaattaatttgccgtcatcttgagttgcgttcgatcggttttttgagccgcttgcatgcatcgataaatcgaataaccacaagcttcagttaaagccttatccaactgcttttcttgcatcttacttggcacaacggttttaaacgcccggtaggccaattttaaatcagtgaccttgaccccaaattcgtaagcctgttccactgaattataaagatgcatgacctgaaccacttcatctggggtccaatcaggttctaatgggtaactataatttgtttgcataaaaactcctgttattcaaaaccagctcttcagatagtttacatattttgtcgttaactgatttacattataccttatttagcaactaaaaacgcgaccgatttaacataaaaaaataatcgacacttgtcgattatctttttagcccctcaatttagatattaattggcatccctaacgctagttcagcaccatccataatcgcttcgctgagcgttggatgtggatgaatcgtcaatgctaaatcttcagcattcatcccggattcaacggctaacgttaattcggaaatcaaatcactggcaccagcacctgcgacttgtgccccaattaaagtatgatctgctttagtggtgactaaccgcacaaagccatctgtatcagccagtgataacgcacggccattcgccgcaaatgggaatttagccgctttagcgtcaatccccttgactttggcttcagccaacgttaaaccggttgtcgcgagttccggatcagtgtagcaaacggctggcattgcgtgataatcaacgattgacttttgacccgcaatcgcttcagccgcaattttagcttcgtagctggctttatgggccaaggcagcgccgggaacgatatccccaatcgcataaataccagacacattagtttggccttgttgatcaacttcgatcaaaccacggtcagtcaattggatacccgcttgcgcgattcccatgtcatctgtattaggtcggcgaccaaccgtcaccatcacataatcagcgacgagcgtttgttcctggccactaacttcatatttgacggtgacgtttgtatcggtttcaacggcttctttagccatcgcaccagtaatcacgtcaacacccttggccttgaagttcttcgtcactaactgcaccatatctttttcaaagttcggtaaaatggtatccgttccttcaagaatcgtgacgtgtgcgccaagattggcgtaagcgcctgctaattcagagccaatgtagcccccaccaatcacaaccaattccttaggcacttcagttaagtttaatccaccggtcgaatcgatgacccgttgactaaatttaaagcccttaatttcaattggccgactgcccgtggcgataattaaatttttaaaactgtaagtttgggcactatccggatggatgacacgtaagctgtgctcatcgactaaaaaggccgaaccttccaacacatcaatgtggtgtttcttaaataacatcgaaacgccacccgttaaggtttcaacgacctgatgttgtttccaatcttgcgttttagcgaagtccagttgcgcacccgtcgtcgtgacgccaaaaacatcagaatgttgagcggcttggaaccgatggccggcagaaatcaacgcttttgaaggaatacaaccgacgttcaaacaaaccccgccgatgttgccacgttcaatcaccgttactttttgacctaattgggctgcgcgaatggcagcaacatagccaccaggaccagaaccaatcacgactgtttctaattcaattgcaaagtcacctactaccataatctcgtcatccttccatcaataatagctctggatcagctaatagttcttttaattcgttcattgcccgttgtgcagtcccaccatcgattaaacgatgatcaaacgataatgataatttcatcactttgccaacggcgagttcgccgtccgcgttgacgactggttccgtcgcaattttaccaacccctaaaatcgcaacttcaggatggttaatgactggtgtaaaccaaccgccaccgattgaaccgatattactgatggtcattgaaccaccattcatttctgctggtttcaattgattatcaagcgctttttgggtgttttcagtaatttctttagcgattgcaaagatactcttcgcatccgcatttttgatgttcggtacgtataaaccgtgatccgtatcggtcgcaatgccgacgtttaaataatgtttgtaaacaatttcgttcgtcgtgtcatcaattgacgcattgagcattgggaaatcgcgtagaacggtcactaacgctttgacgatgtatggcaagaacgttaatttgatgtctttcttagcagcgacttccttaaatttcttacgatgggtcattaacgctgacacttcaacgtcatcaaacaacgtcacgtgtggtgccgtgtgtttgctagtcgtcatcgctttcgcaattgctttacgagttggcgacatcttttcacgggtttccatctctggcgtatcggatacaaatggtttaactggcgttgcaacagccgtttgcgttgtttgtgtttgcgcagtagcagcagctggtacggcatcattggcaccggtcgctaccacttgtccaccttgcatgaattgttcaacatcagccttggtaatccgaccgtgtttgccagtcgccgtgacttgactaatatcaacgtcattttgacgcgcaaattgacgaactgatggcattgctagaatttcccgattagggtcactgatggcaacgaccgttggattcgtcgacgcaggttgttcagtggccggcgcaacaactgctgccggttcaaccgaagccgtcgttgtcgtagtggtattatgaccaggtgcatcaatttcaactaagacttggccgactgtcgcgacttcgccttcacccaccaaaattttaacgactttcccactaacgggtgatgggatttcttcgaccgatttatcattttgaacttctaataaagtgtcgtcttcggcaattgtatcgccttcagcgaccgcccatttctggatttcgccttcagcaatcccttcaccaatatcgggtaacttaaattgataaaccccttggccaccttcaacgaccgcagcaactgcttgtacaggttcagtggtatcagccggtgtttcagcatcgggtgaatcgatttcaactaagacttgaccaaccgttgcaacttcaccttcagcgactagaatcttaacaatcttcccactaacgggtgatgggatttcttcaactgatttatcattttgaacttctaacaacgtatcatcttcagcgattacatcaccttcagccactgcccatttttggatttcaccttcagcaatgccttcgccaatatcgggtaacttaaattgatatgccatgcttttaatcgtcccttctctaatcagcttttaaaagttgataatttctttgactttattttcaatatccgttgcatttggtagccaagttgcttccgcttgtccaaatggaaatggtgtatccggcgctgctacacgaccaatcggtgcttctaaggataaaatcgcacgttcagcaatttcagcggcgacttgcgccccaacccctgcttgtttttgagcttcttgaacaacaacaacgtggcccgttttcttaaccgacgtaataatcgtcgccatatctaaaggcgcaatcgttcttaaatcaatgatttcagcatcaatttgggctttcgctaaattctcagccgctttttgagcttcgcgaaccattgcaccataagtcacgatggtcacgtcagttccggctttcgtaattcccgctttatcaagggggaccgtataactttcgtctggcacttcaccccggaacgaccggtacaacttcatatgttccaaatatagaaccggatcgttagaacgaatcgctgaaatcaacagccctttggcatcgtagggattactaggtacaaccacccgaatgccgggaatctgcgtaatcatcccttcaaaattatctgaatgcatttctggggtatgcacaccgcccccaaaaggtgcccgaatcgtgattggcatattgcgggtgttgcccatccgatagcgcgtccgtgacatttgcccggcaattgaatccatggtttcaaaaataaaaccaaagaattgaatttcggggactggtcgaaaaccttctaaggccaaaccgattgataaaccaccaatgccggattcagctaatggtgtatcgaaaacgcggtcctcaccatgtttggcttgtaagccttccgttgcccggaaaaccccgccgtttttaccaacgtcttcaccaaaaatcaagacattatcatcttggcctaattctaaatctaacgcatttgtaattgcttgaatcatcgttttttgtgccatcttaattggactcctttgcagtgtattcagcgagttgttcttgaatattttgcggttgatcttcaaaagtaactttcaaaaagtccgttaccttttgtttaggagcagcgtctgcttcattaatcgcttgtttaatgtctgccttaacttgatcaatcaacgtatcttcttgcgcttgtgaccaaaggcctttatccgttaaaaattgacgcatccgcgttaatggatcccgtttcaaccaaatatcgtcagtttccttcgtccggtaacgggttggatcatccccagacaacgtatgtggtccataacgataagttaaagtttcaattaaaaccggtccattgccggcagttgcgtaatcgcgtgcttctttcatcacttcataaacggctaaagcgtccatcccatccacttgaatggctggaataccggccgcaacccctttttgagctaacgtgactgctgcggtttgtttttcacgtgggactgaaatcgcaaacccgttattttgaacgacgaaaatggctggggctttaaaagcacccgcaaagttgagtccttcatagaaatcaccttgtgaagtaccaccatcaccggtatagacgtaaacggcattttcagaatgccgttttttcatcccaacggcaacgcccatcgcttggatgtattgcgcaccaataataatttgaggtggcatcgcttttaatgattccggatatttattaccatcaatgtgaccacgcgaccacaagaaagcttgtgataacggtagcccgtgttgcactaattgtgggacatcgcgataacctgggaataaaaaatcatccttcgtcatcgcaaaattactggctaattggctagcttcttgaccggcagttggtgcataaaagcccaaccggccttgtcgatttaaagctgttgctcgttgatctaatacccgtgaccaaaccatctgtttcattaaatcaactaattcttcatcgctcagatccggcattatttcaggattaacaacttttcctgtttcatcaagaatttgaaccgtcttaaattcttggctttctgaattaagcagtttgtcaaaatcaactgcagcgtgtttgtttgccatcattatccatcccttcaatactaactgttttaatcataacatacatctgtattattctactgattcaacacctttaatttagcattttattgcacacaatgcaagcgcttaacaatgattgagcgagaatactagcatcgttagcaatgattgatatatgtgaattcaatcactaaaacgtaactgtattaccgctgtattattataaaataaccatctgttgtataataattgtttttaaaagccaaaaaaagcattcacaacgatcgtgaatgctttttttgttggggtactgctatgcaaaaatcggttggggtatctcagcgttgccagcgtgaatcaaagactgaacaacggccttgtgtcccggttcaacttgtaaatgttgcatcaagcggtgtaattcaaccatcattaaagttgaatgaccaccattgacgcgtaaaaagtgcccggttttaatcatttgaactaatttaaccattgaaactaacattactgcaatcgtcattactgctaccgcagcgaatgcgcctgggctaaccattaataacccactaaaagtcatcatagctgtgaaagccgtcatcaatgaccgcaccactttcaccttagccacttggttaaccgttaaaaaacgcggatctaccaccacaccgtgtaaatcattaactggtgtcgtttctggtgccaccaccgtcatgttggcgtttaattcaacgaccgcaactggtgctttttcaaccgttgctaatactagaatatcgccaatcactagttggccggcactaacttctcttaagaagccgtctcgcatcaccgtcaccaattgtgttttttccggtgccaccgctgtgcgtttagccacttcggcacccgtcaaaccactaggacgtgttaataagacccgcattagcatttctaagctactaatgccttgaattgtcatgtttggttttaatttttttagcatctcgttcgacactccttccctttagaggaagtcgtcgtaacactgctagccggttattgctggcagtaaaatgacagaccacctcggatgatcgttatcactactactaggaccttcagctgtttgcatcattctactcaccagactttctaatttgaattaagttgattgaatcccgtgtacaaaaaaagacgcacaacaattgagcgtcaccgaaaaaagctggcgttcccaatcgttcagttttagcactatatgacgtagaaaccttgttcagctacgttagaaagagccttaattggcaatttctgttgactcaattggcatctctcgatgtttctgagtagcagcgtctgttcatataggagcctcacctaacggaaaagcaatatctcttatacatttaattttactggttattgttagccccgtcaagcgatttatttcgcttcttcttaaattatgctagaatagataagtgatgaattaatcggaggtctgaactgtgatattaatgaaagatattatccgtgagggaaaccccacacttagagcaattgcacaacccgttacattcccattgtctgctgaagaacaacaattagcagccgatatgatggcattcttagagaatagccaagacgctgagttagccgagaaataccatttgcgcgccggtgttggtttagccgcccctcaagtggacgtttcaaaacaaatgtcagccgtcttagttcccggaccagatgacgaacccatctttaaagacgtgattattaatccaaagattattagccattccgtccaaaatgccgcacttgctgaaggcgaaggttgcctctcagtcgatcgcgatattcccggctacgttccccgtcatgatcggattaccttgcgttatcaagacgtcgacggtacgagccacaaactgcgtttaaagaactatccggcaatcgtttgccaacacgaaattgaccatttaaatggcatcttgttctttgatcacatcaacatggaacatcctttccaagcagatgatgatttattgattattgaatagcatcgcattcaaaaaggcgggcccacctatgtggactcgccttttttataccattatttttgactatcggcaaattgactattatagaggttcgcataaacaccctcggccgcaagcaaactctcgtgagtcccctgttcaacaatctgaccgtgatccatcaccaaaattaaattagcatcgcgaatcgttgatagtcgatgggcaatcacgaaactggttcgcccttgcatgactttttccatcgctttttgcaataagccttccaaacgcgtatcaaccgaactagtcgcttcatccaaaatcagaatcttaggatcggcaatcaccgccctggcaatcgtcaatagttgtttctggcctaatgaaacgttactcgcttcttcgtcaatcgccatttggtaaccgttaggcaacgtatggataaagtgatcaacattcgccgttttagcggcatcaaccacttcatattcggttgccgctaatttaccaaaccgaatattttcggtaatcgtcgtatgatacaaccacgcatcttgcaagaccatcccaaacaatgaacggaccttttgtttagcgatttgttgcgtgttaaccccatcaatttcaatcgcgccgctgtcaacgtcgtaaaaacgcatcaataggttaatcatggttgtcttaccagcacccgttggcccaacaatcgcaattttatcgccaggattggccgtaaaacttaaatgtttaatcaaaggtttttgagcgtcataactaaaggaaacattcttaaagaccacctggccttgcgggttggcaggcaattccgccgtctcgtgctcggtcgtttcaaccggttcatctaaaatttcaaatacccgtttcgtcgccgcggcagcggattgcatcacgcctgataattgggtaatttgtgaaatcggttgattaatttgccagatatattgaatgaacgcctgtaaattaccaaccgtaatcacaccgtgcaagacatagtaaccacctaaggtcgccatccctgcgtaagttaagttagtggttaacccaacaagtggcatcattaaaccagaaacaaaagcggctttaaatccgaaatccgttagccggtcagtaatcgtttcgaattcggtgtaggcccggtcttcttgaccgtatagtttcaaaatactgaatccaccataattttcttgcacaaatccgttcaattcccccaaggtgttttgttgaccttggaaatacggttgcgatttttgaataattttttgtgaaatcaataacgacgccggaatcataatcaacgatagtaacgccatccaaatattgattgcgaccatcatgatcaccgccatcacaatccccagaatcgaggtaatgacttgaatcagactttgttggagcgcattagtgattgcgtccacatcattagtgacccgcgataaaatattcccttgttgttgggaatcaaagtaccggaccggtaattcattgatttgcaaatcaatatcacgccgtaaatcacgcatggcgcgttgcaccgctcgggtcatcaagaatgagcccagaaacattgaaacttgatacaaaatcgcaaaactgagaatcattgcgatcactttagaaatatattggaaattaatcgcaacgtgttgtgctagattactgccaatttcggtcaccgctagccccataatgacaggccatagtgcattcgcaaaaactgaaatcacggttgcgacaattgctgcccaaaaagtcagtcggtaaggcccaatgtagcgcatgagtcgttttaagattttaagatttttcattgagctcctcctctgataattgtgatgccgcaattgcccgataaatttcgttagacgccaataattcgcgatgcgtccctatgccgaccactcgaccttcattcaagactacaattttatctgcattcataatcgtcccgacccgttgtgcgacgattaagacggtcgcttgttttgtaattggttttaaagcagctcttaacgccgcatcggttttgtaatccaacgctgaaaaactatcatcaaagatataaatatcaggtcggcggacaatcgcccgagcaatcgcaagtcgttgcttttgaccacccgataaattactgccaccctctgctaaataggtttgcaatccttccggtttttcagagacaaaggttttcgattgcgcaattgttaaggcttcccacaactgttcatcagtcgcctcaggattgccataacgtaaattatccgcaattgttccggtgaagagcaccgctttttggggaatgaaaccaattttttgacgcaaagctttcatccgataatcacgcacgtcatatccatccaacatcacttgtccgcgcgtcacatcaaagaaacgcggaatcaactgaattaaagtcgatttaccactaccagtactgccaataaaggccaccgtttcacccggatgtgcttggaacgacacatcccggataacgggactttcagtaggaccaggatacgcaaaagacacattatcaaacactaattcaccatgggtttcagtggttgtaatcccatcttctgcattggtcatatccgattttttggcgagtaattcttcaatccgttccgccgaaaccgccgcccgtgggtacatcataaagacgctggcaaataacataaacgagaaaagaacgtgaaaaatatattcaatgaaggcaatcaaagtcccgacagccaaatgaccggcgttaatttgaaccgcaccttgccaaataatcagtacaaaaacaatgttaaagatgaacgaaaagcccggttgagcgaccgccatcaatgtgaataatttgattgagctttgactgtaagcttcattgacttttttaaaccgactctgttgaaatttttcacggacaaaagcccgaatcactcgaatcccggttaaattctcacgcagatttaaattaatgccgtctaaattttgctgttgtttttcagacatcggttcagatagtcggccgataatgaaaacgccaatcaatagaatcggaatcgctgcaaagacaatccaagataatgaccgactcgtgcgaacaatcataaacgcactcgcgacaatcatcatcggcgtcatgaagccggttcgcaagaccatcgacatgaattgcatcacttgaaacgcatcattagtggttctggtaatcaatgacgagaccccaaattcaccatattcttgatgcgaaaactgcatcgtttgtttaaaaatatcgttgcgcatatcccgaataaggagtgtcgtaatccgactaccggtatacgctaagccgattaaaccgactagcccgattaaacaaataaccaccattaataaaccaaattgccaaactggcccaaaggtatgtcggttgatgcctttatcaatgatttgccccaaaagcgtcggcaaccctagttcgatcaatacaaaaccaaacacacaaataaaattccaaaatagtaacttcttatagcgaatggtataccgccacattaatttcatcgattcaagacctcttttatctttagaatgtttaacttacacgcgggccatatcctttacatattcaatcgtctcacgattaacaataaaagccacgtcaaaatgatactgttgatccaataaccaagcatccgtaatcatcaacgctggatatcgtggactgactgacgcaattcggcgttcataggcgacagcgttcaacgtttcctcaagttccgttgagatcgcctctaattggtcaactggcgtcacgattggtacttggtactcaaagaccatcacattgccgccccaaacttccgtcggtaaattcgcccgtaacggaatcggagaagcatagaattgaggtcgcttggtgctcactcgttggtaaccgatattgacgagttcgtccaccgttgtttggctacttttttgtagaattcgcatggctcgccggcgtttcaaccgtcgaatccaactgactaagccaattaataatatcactgttaataatgcaatgacccaaggtatcatgctaatcacccatcctcattcaagtattcctaatcaatagtataactgaattgtcggtaactcgccattgcagcgcctatcagaaatgtatactttaacttaaagatatgctaaaatattcttaaatgttgagtaatcaaccactggacggttaaactttcgtttaaaaattcaaacatcataaaggagttttacaattgatttataaagtattataccaagcagacaaaacacaaagccctcgtcgtgaggcgactaaatcactctatcttgaagctaagagcgccgttgcagctcgtcaacttgtcgaagacaatacaccctacaatattgaatttgtgcaagaattaagcggcgaacatttgactttcgaacaagaatcagaagatttcaaactaacggagttttaatgaatgaaactcaatattaagaacaacgaaactgctatttttgccgtagggggtcttggcgaaattggtaagaacatgtacggtgttcaattccaagatgaaattatcgtgattgatgccggcatcaagtttcctgaagatgaattattagggattgactatgtcatctctgattatcaatatctcgagaaaaatcaacaaaagattaaagctttggtcatcacccatggtcatgaagatcatattggtggtctcccttatttcttaaaacaagtgcccaacgttccagtttatgcgggtcctttagcgctcgctttaattcggggcaaattagaagaacatggtcttttaaagtcgactgaactaaacgaaattcgcgaagataccgtccttaaattccgtaaaaccagtgtcgactttttccggactacccattcaattccagatacattaggcgtcgccgtgcataccccacaaggtgtgattgtccagacaggtgatttcaagtttgatttaacaccagttggtaatcaaccttcccctaacttacaaaaaatggcgcgtttaggtgaagaaggcgttctttgtttaatgtcagatagtaccaacgccgaagttcctaatttcagtaaatctgaacggtttgtcggcaattcaatccggcacatcgttgaacggattgaaggtcggattatctttgccaccttcgcttcgaacatttctcgggtttcccaagcggttgatgccgcactcgctaacggccgtaaaattgctgtttttggtcggagtatggaagcagctgtcgtcaatgggcgtgaactaggctatttgaacatccctgacgaagccttaatcgatgcaaatcaattaaattcgatgcccgctgataaggtcatgatcatctgtaccggttctcaaggcgaaccaatggcggctttaagccggatcgccaatgggactcaccgtcagatttcaattcaacctggcgataccgtgattttctcaagtaaccctatccctggtaatacgatgagcgtcaaccacgtcatcaataaattatcagaagccggcgccgaagtcattcatggtaaagtcaacaacatccatacttcaggtcatggtggtcaagaagaacaaaaattaatgctccgcttaatgaaacctaagtatttcatgccttgtcatggtgaataccggatgcaaaaaattcatactgaattagcgcaacaatgtggtgttgaaccagacaattgtttcatccttgaaaatggtgatgttttagcactaaccgctgattcagcacgtgttgctggccatttcagtgctgaagacgtgtatgtcgatggtaatggtgtcggtgacattggcaacgtcgttttacgcgatcgtaaaatgctttctgaagaaggcttagtcgtggtggttgctacaattaatttcggtcagaaaaacattttggctggtcctgatatcctatcacgtggtttcgtttatatgcgtgaatcgggtgaattaatcagtgaagcccaacgacgtgttttcagaatgatcgtcaacacgttcaacgccaatgataaagtgactgaaaatcaagtccgtgaagccattatcgacggcttacaagatttcttattcgagaaaactgaacggcgtccaatgattctaccgatgattattcaaagtaacgaataaatattaaacaagctgcgcctgaactcggttattaattgagtgccaacacccacgggttgattctgagcattagcctagtttcgtgaataattccgatttatggacttatttatgaaacgtcgctaagcacaggaatcagtgggtgtttgcacgttatcaattgagtatcaaggtgaaaatgctggttatcccgaactaaggataaccggcatttttgatttaaacggaaattgatgagttctggcgcgcgtcaaaggagaccgttcgtttaatatcaggatactaaaacctatgtcacagcccctttttttgaattttaaaaaacttaagttgtcaatagctaacttaaaccgctataataaatatcagattgaattttctgaaaggagaggtgcattttggccactcgacctgatttttacattattttaaataaaatggctggtgccggtcaagccgaacaagtttggcccaagatcgaatccgtccttaaccaaaaacaaatcccctttacattgcacatctccaattacgctggtcacactactcaactcgcatttcagtttgctaagtttaaacacactgaccagattctgatggttatcggtggcgacggttcgctgaaccaagccatcaatggtttgaaaaaagccaataatacaaccatccccatcgcttatctcccctgcggttctggtaacgactttgcgcgcggaattggtctcagccgtgatccattaactgctttaaaccaggtgttaggaactaccgaagcgcaattaattgatttaggggagtatcacgatgcgattaaggaagaacatcgctactttgccaataacgtcggtatcggatttgatgccgcggtcgttagtatgactaaccattcgaacagtaaaataatgctgaataaataccatctcggttccctagcttacgtcagttccttggtcaaagccttcatccaccaggatgattttgaaaccaccatcactattgacggccaaactgaaacattcaaacacactttcttggcgaccacaactaaccatccctattttggtggtggcgtaccgattatgccggccgcggtcgtcaatgatcaattgctcgatttagtcctgattgaaaaaattaattcacttgccttttgtttcttgtttctaatgatgttatttggcaagcacacgcgttttaaggccgttcatcattatcaagcgagtcagattaacatccaaactaaaacgcttgagtttggccaaatggacggtgaagaactcgggagtcggactttcaacgcccaattcaacgtcagtcagcaacttttttggctcagcgatttaagccctaaaaataaagtctaatcaaaaacaccaagcctccccgatttttagggcatgcttggtgttttttgtgctacttagaaataatctgagaaatacggttgttccattggaataatattttctagattttttaacgtttttcgatcagccttcaagcgttcaatcttcgctagataggatggccgtcgataactcattaacatcgtcgtcaacgtttgaatatcgcattcaaccggatcgccaaccggccgtttggtaatgtggactttgccttggtcgttccaataaacaccaaaagtcccattattccaatccgctagtggatctgtcaatacaaagtggaacgcgtgcccgtccgtttcaaacggataggccttcagaaattcctgaacatccacaatccgcgccataaaataaggttgaatggtttgttcaatatcaccatcatctaacaggaaagaaattggttcatcttgatataaatggccttttacgtgatcgaccattgaataatgggcactgataaaattccacagaccaatccgtgcttcttgattgagataaatcatctctttcacatggaaaacttcgttagcaatccagtacaagacatagcccatcggttgttcattctgatcataataaacaccagcaatccgttcttcttcattttcccaacgccaatattcatcccaattcaattcattgcggatcatcgcaccgtgattttgatgggcaaatcggttataggtttcaatcacatctggatcatcgatatctaaccgttcaacatggccggcaaccggtcgttgtttcggcaattggctatcacgaatatcgtaagttagttgatcagacatgatttcccaaccttttttacgataaaaaggaatgttatagggataaagatatgagatccattgttgattagcccgcattcgatctaaaccaaccttgattaaatcgtgcatcaaaccgtgtccggcaaattctggatacgtcccgaccccagttaagcccgccatcttgaatagctgtccgtgaatattgacttcgcacggataaatcgctaattgcgaaattaattcgtccccgttaaaccagccaatgacgtccgatttttctagcactggccgtttagcccgttctaattcgccttcttcataaccactatcagatacttcctgatcagtcacttgaaaaacataccgtaataaatcattaaactgttctaaatattcaattgtcacgggtctaatttctaaattggctcgctggtcaaccatcatttcgcctcatttattttcattattcgatcgttaattcattatacactatttggcaactggcatatacgtatacggtgtaatcccagtcatcccaatcatcggatcaatctgacggttgcttaatgcgtctggtgttaatcgatagtcagctggtgcctcttcaaccgtttcaaccgataggtccaattgggtggtcgtttctgccggctgcttagattcagtgggcgttggcgcaagcggtttggcttcggtttgaccaacactcgccattttaacagctctagctggttgtttgccaccaaaagtactgataatccgttcttttagcgttgtttggcgattagctgataattccttagtcgccgtttcaaacgcgcgcggttcgccaattagaatcaataacgatttggcccgcgtgactgccgtatacaacaaattccgtttcaacattcgttggtactggcccactagcggtaaaatcaccatttcgaattctgaaccctgcgctttatgaatcgacgtacaataggccaacgtaatcttcgaccattcagtccgtttatacgtcacttcggtgctgtcaaacgcgatgattaattcatccatcttgtcggcactattcttagcatacgtgatcccggtaatttgtccaatttcaccattaaacacattttgttccggactattgaccagatgtaaaactttatcaccgattcggtaatggacattgccaatcgtgacctgtttctttcgatcatctcgttttggattcataatttcttgaatcatcggattgagttgatcaatcccagcggcaccccggtacatcggcgccaacacttgtatatcacgggtttcaaagccccgcgctttggctttagtcacgacttgttgaatgaccgattcaatttggtacggactacactgaataaagctacgatctttttgtggttgcaccagattatcgggtaacttgccctgattaatatcatgcgccaactgaataatcgttgaatcgtcatcttgacggtggatctgttgcagttcgatggctggaatcgcctgactctgcaataaatcaaagaagacctgccctgcgccaacggagggcaattgatccttatcgccgaccaaaacaacttgcatatgactcgggactgcccgaattagtgaccggaatagataggtgtcaaccatcgacatttcatcgataatcaataaaccgccgtctaattctttactcgaaatatcgggattattttcccgaccggtaatccctagtaagcggtgaatcgtgctcgccggtaacccagttgtttcactgattcgtttagctgcacgaccagtcggcgccgctaacaaaatcgggaatggtttgtctttgtaatcattgatgtctaacgagaaatcattcaacgccgcaaacagcgtgacaatcccgttgataatggtcgtttttccggtccccggtcccccagttagtagaaatgcccggtgggtcaacgctaatttaatcgcttcttgttgaacgtcatcataatcgattttgaattgcttttctaactggcgaatctcttggtctaaatcgtgtttaggataactgatttgatcccgttcattttcaattcgcatcagatgatcggcaatttgccattccgcattatataacccgttcggataaatgcggtcatcttcgccaacaactttgccgtcatgcgctaacaccattagctgttcagcgaccgcattcgggtcaatggccacattgcgggcttgttccatcaaacgaatacttgtcgccagtaatggcttcgcttgcgtgtaggtgtcgcccgcttgattcgttagttcattgagagcctgcatcaaagccccttgcaatcgggccggtgaatcagctgcgaaacccaatttttcggctaaattatccgcgcgtttgaacccaacaccggtaatatcagccactaatcgatagggattttcttggatgacttttaacgtatcttcttgataattctgataaatcgtataggccatcgagctcccaaacccgtaactatttaaaccgataatgatttgttccatcccattattaatcgtcaaagtgtcgactaaagtcgtttgtttttgctcgtttaagcctaaaggggccaatactttgggatcggctaaaattgtatcgatggcctccaaccctagggtatcaacaattttttcggccgttttttgaccaatccccgcaaatttctcacccgacaaataagccaccaacccggccttcgtcgttggttggttgacctgataattatcggcttgaaattgtttaccgtacttaggatgcgtaatcaatttcccataaaaggtgtattgttcatcttctttaatatcaccaaaactcccggtgaccacgatttccggttcgggccaatcaatcgttttatgtgccactttgattaataggattttaaagaagttctcgggactttcataaaaaatactctgcacggttccggttaccgttggtttgctaatcgcttctgtcgttgtttccaaaatcgccatccctactattgatgatctttagcttgcataaaaccttcaatatccattaattgttgcttatttttttcgaaatagtctggtgcgacttttttagctcgctcaaaataagtcgcactcggctggtctaacacgagttgggttaacccgtatttaaatagggcctcaccattttgtacatcaattttaagcgcctttttaagataactttgggcttggtcaaaatcacccaaactaattaaaatattacccaccaaaatattggtatctaatgcttgcggttgttgttcttgcgccgttaacgcgaaaactaatgcccgtggattttgttccatctgatgatacgtttgcgccaacatatattgggcatcaaccgactgcgaatttttaaccaactccataaaaatggcctcagactgttgatacgattcggcttggtagtacaacgtgcctaacgcatatgagagcgctggttgatcaggaaatttggtcaatgctttttgcaacaacacttccgcttgttcaaaatcttggagagtggtcaaaaaagtcgctaacgtcacataagcttcaatatcagccggtgctttttttaaataatccactagcgcttggaccgcttcttcatgttggccatctgaccattgttttaaaattgccgcttccatttaatcatctcctagattgtatctgaagctgataacgtgcgtttcaaaaagcacgtttcattccagtctaataattgatacgaaatcccaccatccaacgtctctaaagtcgtgaccgatgaattagtcaatccgccatctttacgaatgtcagcaatcggggtttttaatagggcttgaatcatcgcaaccattgctgctccgtggctgacaattagaatattatcagctggttgggccgctgtgacgatggtttggaccgccgcattcgtccgttgaatcacagatgcaaaggtttcaccgttaatcgtggttggatcatagtcagctggcgcttcacgaaaggccgcgatttctcgcggaaactgtttaaaaacatccgtaaacgccatgccttccatctgtcctaaatcaaattcatgtaaatcgtcaacaatcgtcaccggaaaaggttgttttaacgcttttttcaaggtttcagacgttacttgcgcgcgtttcagcggactcgtatataaatgtgtgaattgaatcgtctttaaataagctgctaattcagcaatttcagtataacttgtcggtaataatggtgaatccccatgagcaccttgataacgcccctctagattccattccgtcttaccatgtcgcacaaaatataaagttgtcatcgccactgctcctcaaaaataacttacccttcattatgaaagagtcctgccataaattcaagtcgcgtggcactaaaaaagcgtaagaaattaaattcttacgcttttaatttatttactttcggcaacagcttgcatagcaatcgcgttgacgtaattgacgggttggtcatagttaggttggaagaacatatcaaccatcgctaattgatcaatcgtcatcttagtttgaatcgccattgatacgacgttcgccgcttgagcaatatcatattgacttgtaaatgacgcccctaaaacttggcgtgtttctggactccacatcaggttcattagaaccgaagttgttgaaggcataaagtctggacggtaatcttgttcgagcgttgttgtcgccacctcaatgccgcggaccttagccccttcaaccgttaaaccagttcctgaataagtccgaccgaacaattcaacggcacttgttgcttgagtccccatatatttctcagttggtgtttcaatattccgaccgatcaaaagtccttggcgaaccgcattggttgccaatggaatataatctggtttttgagttgggttgtagaagacagttgaagaatcccctgctgcataaacatctttaacggacgtttgcatgtattcatcggtgataatggccccattgcctaacatctcaacttggcctttgaacaaaccagtattcggtttgaacccgacacataagacggcaatatcagccgtataagcgcctttatccgttttaaccgttacttgatcagttccattaaagctcaccactttttcattcaaagctagtgtgacaccatgatcacgataatcttgttccacaatttcagagatattgggatcaaagtttttacccaaagcgtgaggtagtgcgtcgaccaatgtgacttctttcccgattgtcgcataagcttccgccaattcagcaccgatataaccagaaccaatcacaacgacgctcttaacgtcagccgcactcttctttaattcattagcatggttccaattcttgcaaagtttaacccgcggattatcaatcccttcgattggtggaatcacaggcgatgaacccgttgtaacgataattttatcaaattgttcaactgattcatcaccagtcactaaatttttaacttttaaggttttatcagctaaattcgtttctaaaacagtatgttgcatcttcatgtgtgcgcctaattgcgccaaagtatctggtgtggcataaaacattttttctggatgggcaacatggccgccgacccataaagcaatcccacatgacaagaatgataagttatcatgactttcgtaaaccgtgacatcccaatctggatggttagtcaatgtttcctgtgctgcaaatgttcctgcgtgtgtacaaccaattactgctactttcatgatagagcctcctatttaattaaaccacttaatattattagtttgtgaatgattacacatctgtgcataattgtattgtacgccatatagtttctaaatgtcaacaaagagcccttcaacaatcaatcctatcctttgaacttaaaagtttggggcgcttttttccagataacgatgaccccaatggcgacataaattaaactaacgacggaaaccaacagacaataaatcagacccgatgatttgatttgaagactcatgtaagccacccaataaaaaacgccactaataattttgtaggctggattaaccaccgacaaatcactcgaaaacggctgtaagatataatacacaaacaattcatgaaaagacaataaaaatgacaggctgaacagtaagaaaattagtaatccaaagaaaagcccccctaaaaagaaaccattaataatgttcaccagtaaaaacatcgccaaaatactaactgagagaatcccattataataaaaagtcttccaaaaacgataatagaaaccttgcaaaattgttttgggttcacgataaaatggataaaacaataatgccgcatcacagttaataaataatatttgaacgatctttttcccaaagcctaaaagatacatcaaaaaaaataacaccggtaactgattgataaatattttttcgctatctgcacttttcggtaagaaatacatcagaatcgttaaaccaacaccacccatgagaatccataacaagcgccactttaaacttctatttaacgctgcacgataccgtgtgaataaaagtgcatttaaatagtgattccccttcagctgacttttttcaccttctacaaattgtaacgccttttgaagccgtaagccttctccaaaataggcatttgtttcacgttttgtttttttggattccgaaaataaaccagtcgtacgcattagcactcgactgtaactttcttgatcatcatgaatcaataataaactggccccaaccacgaatagtagcaaccctaaacagccccaaaaactaaagagcacttgatacattattgaaaaataattctgccataaaatcaatccaagcgctgcgatgattgccccataaacagaccctgagagtacgaaacgcggccacttagcaagcatccgaataagtcgcgcctgataaaagaaaaaggctgcaaaacctaaataacctaataatccgacaggtacgatccaaaaattgccaagaataaacgccgatacgacaaatacaggcagataaaataaactttcccttagcggttcgacaaaagtcttcatgcaaagcacatctctaggggcaatctgaaaatagttaataaaatccagttcagactgataaaatgattgcatgaagccttcgattgctctcgataacaaaggcacagccccaaaccataaaatgagtccggcaaccattgggccattgagtccgctaaaattagtgatacttttaatcagaatcataataccaactccgacggcaatccaaataaatttcaatagtaatttaaatagaatcgatacgattgcgccaagaatgaataaaccgtgcttaatgtcatagtattgaaaaatggttgccggaattcgtttcccaatgagcggtattttgcgtatgtaatataataaaccgttaattttacgggttaactgaattcgctgcatgaagctataaagttgaatgagatgcataaattctgccatttactcacctgcttcatttggaacaaccgtttttgaaaccatttgctgtttttcagaatttgttgaaagtaaagcgataatttcctcttcaaaattagcatcatgaattcgttcagctgaaatactagttaatttaccgtcgtgtaaaagaacaatctcatcacataaatcctgggccaattgtaaaatatgcgtcgagaaaataaccactgaattttctttctgtgcgataatcaattttttcatttcatgggcggcgacgacatcaaacgacgtcaacggttcatctaataataaaacatcggcatgaaccatcattgtgactagcatttgtactttattatgcatgccatacgagtagtctcttaaaagacgatgatgatctttttcttcaatccccgcctctaacaaataaacactgggatcttgaatcccttgaatgcgggcttgattgacctcgataaaaaatttaacaaactcataaccggttaaaaaacctggtaaatgcgaagttgcatagacaaaccccacgtcggtattttcataattctggcgcgatacgccctcttcatcaaacgcaatttggccaccatctaacggtaagttgcgtgaaatacaattaaagagcgtcgtcttccctgaaccattacgccctaataaaccatatattttacccttttcaaacgtaaaagaagcgtcatcaataatggtttgttgatcaaattttttagtcacatttgttaaagttagtttcatctttttcccccaactggtcatattatttttttcattatagcacaagagaatagcgctttcacatttcgttactattagggtattctcaaaaaattgtactctgcctgacatttctaatcaaaaaaatagtctcacaccgatgaaacctggtgtgagactatttctagtacatattcttatattaacttgaaaggctttagtccaattaacaatgtgctgttgagttgctacccacacctcaacacactactgatttagatatattgtaaaacagtactttcgacttggttgtcgatttgaacatttttgtaagcaatatcaatcgtgccgccacctagacattcagcaccgtcgtagaacacaacggcttgacccggtgtaatcgcacgcactggttcgtcaaagaccaccgttgcggtcgtttcagaagtcatgtggacggtcacgccaacgtcttgctgacgataacggaacttcgcggtcacgtggaaatcggtgccgtgatcaatcggtgtgatccaagaaatattagcagcatctaacttatccgcatacaacaacgggttgtggtaaccttggccgacatataaaatattttgggctaaatctttgcccacgacaaaccaagggtcattggaatcaccaccgccaccgataccaagaccggaacgttggccgattgtataatacatcaaaccatcatgggtgcctttttcaacaccatctacagtcaacattttaccgggttgtgcgggtaaatattcacctaagaattgtttgaaattccgttcgccgataaaacaaattcccattgaatccttctttttagccgttgccaaaccagcttcttcagctaaacgccgcacttctgatttttgcatatggccaatcggaaacattgctttttgtaattgatcttgcgataacgcactcaagaaataagtttgatccttattgctatcgccaccgcgcaacatgtgcgcaatcccttgagcatcgcgctcgatttgggcataatgccccatcgcaataaaatcagcatccagttccattgcataatctaagaaggctttgaatttaacctctttgttacacatgacatccggattaggcgtccgaccatgtttatattcgtctaagaaatattcaaacacccggtcccaatattctttttcgaagttaactgaataataaggaatgccaattttggccgcaactttcgcgacatcctcataatcttcagtcgcggtacagacaccattttcatccgtatcgtcccaatttttcatgaacacaccaattacatcgtacccctgttgctttaatacgagggctgtaacggatgaatccacgccgccgctcatgccgacgactacacgtgtatgactgtggtcttccacaatatcaccatcatttcaaatagattctagttttctacgagttgaaggtcgtgaattccagtaaactctattataacaatcacagcaaaattttcaaattattacactgacttttcataagtaaacagtttcaggaaacggacaacctccgcttaacctaaaattcccaattatcttaaaaaccaagataactgggaatttcttgttaatgctcagttgctgaccgcaacccaacacactcatttatttgttatttataagacgacaatatagtaatttcaactataacggttaatttatatatcacaaaaaagaaatcaaaataattagagagtatcttaaaaatatgaagactatggaaaaatatcaagctccaagggaaaatccttttgtttcttaatcaatcagaaaataaagtagtttatgattcaattaaatcagatattcatgaattatattcacttttaaataaccgtaacgatcagtctccggagttattagatatattagacgttctaggtcaagtctacaaaaatattgacgattctaaacatcccgaagcactcgttaatcggttggtcaatttcattagaagtacggcgattagaggacgtcttaattttccaaaaaatcaggaaaccttaatcatcaacctatctgcgcttggccaaaaagccggtttgaatggtaatgaactcggcaatacttccgataaatcgcaattttataattggaatgagcaaattcctaagcactaacaaccatttagctagatcgtccacccgcgattatattttaaaactaacattatagtagtcattattttatgtgaaaggataatccattatgctaaatctcaaaaaaatgctgccctttgtcgcctttccggtattaatcggctgtattattctggtatttcttaaaggcaaccattggtatcccaaaacgatagatacattaatcattgtgaccacggtgattctgattaagctatagatcaaaccatgagtgctaacacctatggtttgattgggacatgtttattttgctatcgtcacttcagcttaggaacgtttttaatcccgttcaggaagtcttcaacccagaacaactgaattcgattaaacttcacttgggtcctgaattaatgtgcgtctaaagaacgcctgatagtaatttcaccagaccttcaatcgaaatttttctaacagtatgaaagcgaggacctattttgaattcaacagacgacctaaaaaataaactgattgcctttcatagggcactcgaaaccttagccaattcgtccgaaaaacaacaagcattaattgcgacaactactttctttaatcttgttaatgacgacaacaatcgctttatcgttgcgaccggcgctagtgactttatcagtcaaattattcttctaaggggtggctttagcggtcaaaaaatgattttatcatcagaagccaacaatctttttgaccagattcaaaccagcagcccctacgatcgcactaaaatggtcacgttttaccataattgattaatcaacaaaggagtatcaaacaatgggattattaaaatggttttcaggcggtaccgaccgttctgcggaagcaattaaactgattgcggcattattaaacgccttggggactgatgcacaaaacgcgccattattagttgttcttaataaatacgaacacgaattaatcaagcaagaatcagcagtaccttttattttaagtcgcatgaatatttcaattgccaacacgattcgaagcaatcaaatgactttaaacgcaaaacaaaccgaaaagttaaaccaattacaagccctctctaatactagatatggctactaaataaaggagtgttaatcattggaaaataatcaattattcgctttaatcgacagtgcttaccaagaggacttatcgaatcaaccagcagcgtatcgtcaagcactcctaaaaagtgccgaggcattgatggccggtactgatgaagttacagtctgcgctaatctctatcaggtctgccacaacacctttattgtgcccatgagcctcccaactgccaatcgcagtctgtatcaattcattgaacaaactttaaaaaacactgatcaaaaacggttacgggatttaaatctgggttacggtttaattgcgacccactttacttttgggccgttgaattaaacacaaataaaagcggccaatcctaatttcttaggattggccgcttttatttttaaagtcatcgtttaatcttcgtccccggttaagtctttcattaattggctaacctcattaaacgttggcaaacttgaactttcagtttcttggcgagcttgattactcgtttggttcaccctgtttgattgatttttttcgataggcttatttttattcgttttcacgtccagaacctccttggcctttattccgccgtccaataagccgcattaatccggtcaaagtcttgattgtgagtagtgaccatcggggctttcgcggttggatgcagttgttgagcaatcgtcgccatcgcaaccgtgccttcttggaaggcattggcaattaaactaaccccaatcttagcgccgacttgctgcccaattggttggactaaaggcgtcgctagttggtctggtgttaattgccaatcggtatgcgtgtccaatgaacgccggtagccaaagctcgccacgactgcatcgacggcaacagtttgttgattagctaaggtaacggccgtcaattgcccattagcctgttgataacttagaatcggttggacttggtaatcgatttgtggataagttgttaagaagtcttgttcctctgcttcggtcgcaaacggtcgcttggcgacaatccaatgcacttctttggcagttgcgattaaatggggggccaaggccatcaaattatagcccggtccgactaataaaaccgactgctcacgataagcaaccggattttgcggcacataactgacattggtgtaagtctgttctgctaataacggccacgttttatggcggaccattccgccaccaatcgcgagcactaacgcttttgtttggtacgtgatttcggcagtctgcacgttgtaaatcgccgcagtcgcatcataactgacatccatcacgagggttgcggtccgtatcggcagtggataaagttgcgcttgttcttgtagattttgaatcaactggtgcccactaatactcggctgacccccgatatcgtgaatcacacgttctgaataagtcacaactttaccgcctaaagtgggactcgcttctagtaattgcgcttttaaaccgtataaaccagcttgaaacgccgcgtataagccggcgggcccgcccccgataatcgttacgtcgtatatcatctaaagtctcctcatctgtcggttttaattaatagataaataaaatacggggcaccaatcaacgcgactaacacgccagccggtaattcagtggttggactgagtaccttaccgagtgtatcggcgatcaataaaaagctactccctaacaaaccggtcaaccatagttggtagcgatgttgcgacccgataatccgccgcgcaatgtggggcgtgattaagccgataaagccaatcccaccgctaattgacacactcgcgcccgctaacatcacagcggcgccaatcaataatagtcgttctttttggagttgtatcccgagcgattgcacgctatcgtcaccaagaactaaaacgtctaagagccgttgtttgctcatgatgaacgggattaataacagtaaccacggtaatagcgcccagacaaacggccaactcgtgccccagatactgccggctaaccaggtcatcacgaattgataattatctggtgataacttcaaggttaataagaccattaatgccgaaaaacaggtggagagtgcaaccccggttaataataaccgattaggcgtaatcccccgccctttttgatacgcacccagaaagataatcgccgcactgatgagcgcgccacctaatgccagaatcggcagtagaaatagctgactgctctgattagccgcaaaagcgatgaataacatgaccgcaatccccgcgccggcattaatccctaagaagccggtatcagccaacgcattttgcgtagtactttgtaacacttcaccggctagtgctaaggcaaaaccgactagaatcgcgaccacaattcgcggtaagcgaaaatcgactaggattaaggcgtcttgcgcgctaccttgaccgcggattagttgcccaattgcttgccagccaatcgttaattcgcccgtctgcaaactaatcagactgacgacgacaatcaatagactgagaccgattaaccaaccagtaaagcgtttcgactgttgtttacccatgttggcgtccctcccgtcgtgctaaataaataaagaacggcaccccgataatcgcgatgataatcccgaatggtatttcttgcggcgcgttaatcgtccgcgcgactaaatcggctaagacgactaggctcgcacccaataacagactaatcggcataactttacgtgtatccggcccaactaaaaagcgcgcaatgtgcgggatcattaacccgataaacccaaccgaaccgaccaaagccaccgatgcgcctgctagaatcacaacacaaccaaaaccgattaagcgaatccaaccagtctttcggcctaaactgaggactaattcatcccctaattgcaataagtgtaactgtggggctaataagagactgattaacaagccacaaactaaccatgggcctaagccgctgagttgcgcccagttaatcgccgccacgcccccaaaatgccagaaggctaaatcctgtttgagttgcatcactagcgcgaggccttcactcaacgcgactaagcaactactaatggccattccggctaacaccaccgtcgtcgtttgactgccttttttagtccgactaatggccacgactaataacgccgcgaataatgctccggtgaacgagaataacgccgtgccaaccggacccatcttcgggaagaaaataaaactgaccgttaacaataaccccgcacccgcgttgataccgagtaagccagaatcggctaacggattatgcgttaagtcttgcataatcaccccgctacccgctaaactggccccaatcaacgccgcgccgagcacgcgtggtaaccgaatggtgtgcacgattgcttgggttaaggaactggcgtgataatcgactagcgtttgccagaccgtttgtaacggtaccgttgcggcacccaaacaaatccctaacactaaagtgatgcctaacaaaatcaaactccccagcaaaataattttaaaatggcgtttattcatctgtttcggccccgttccagcgatcatacgtcagaattaacgggcgaccgtcgtgttcaactaaggtcgcatcaatgttaaaaatctgccgtaagttggtctgcgtcataacctcttgaacgctgccactgacttgtaattgtccgtcctttaaggcaatcagttgatctgaaaagcgggcggcgtggttcaagtcgtggagcgccatgataatcgtccggccttctttttgattcaaatcttgaatcaataacatgatttctaattggtgcgttaaatctaaataagtcgtcggttcatctaagattaaaatttcggtatcttgcgcaagcgccatcgcaatccaggcccgttgccgttgaccgcctgataaggtactgatgaaccggttctcaaaaccgactaaccccgtccgttcaatcgcccaatcaattttacgttgatcgttggccgacagcggcatcaatggtttgcggtacggaatccggccaaacgccactaaatccgtcacggttaggtcactcattaattcccctgtttgcggtaagaccgccattgattgggcgaggactttgggattttgttcggccaaattttggtcattgagcaagaccgtgccactggctggcttcaataagcgggcaatcgtccgaattaacgtcgatttaccgctgccgttgggaccaattaacgtcgtaatttgacctttgggaatttgaatggataatgcttttaaaattaagtgttgttggtaacccacactgacttgttcagtctttaatatcgacatgctgaagactcgctttccgttttttaacggtactaattcattataagaaatggcgcgcgcgttgacaatccctcgccattaacccgttagcgctctcaatttggtaaaaagcccttgacaacaaggtctatcaccattgataatgagaattgttctcaataaatatttttttacctttggagggtttatgaaaaaaagtacgcgcttcttcagtttattaacgattaccttcaccggcttattattagctggttgtcaaaataaagccgcgaccaaaacggcgacgacccggactttaaccgatagcatgcaacacaaggttaaagtgccaacgcatccgaaacgcgtgattggttcgtatctcgaggattacttagtctcactcgatatccaaccagtccgccaatggtccgttaaaaacggcacgagccgccaagactatcttgctaaatatctgaaagatgtgccattgattaattacgatttaccttacgaatcaatcgctaaggctaaaccagatttagtattggttggcactagcagcaccgtgcaaggtggcaaatacgcccaatacaacaagttagcccccacttacgtcgttaaaaatggcgataccgtcaactggcgtactcaattaaaagacgtcgctaaggcggtcaacaagacggctaaggccaaacaagtcctcaaagattacgatcaacaacgtgctaaagcccgtaaaacggtccaacaaaaagcgcccaatcaatcggccgctgtcttgtgggtgactaacaattcagccttcattgtcaacgaccacgctgcgagtggtgccttgttataccaagaattaggcttaaaagaacccacattagtccaatccatttctaaaaaagcaaccgctgactggtcgccaatctcacttgaaaaattgacggaactcgatgccgattacattttcctcgtcaacagtgacaagagtgccgcgatgttcaaagaacctatctggcaaaatttaaaggccgttaagaatcaaaaactcttcagctacggtcccaaaacaagttggatgtacaaaggcccaattgcctataccgaaatgacgaaatcagtgcttaaggatattcaataatataaaatcaagctgtgacagaactcggttatcaattgagtatcaagttgaaaatgctggttatcccgaactaaggataaccagcatttttgatttgaacggaaattgatgagttctggcgcgcgtcaataaataatgttcgtttaatattagaatactacgacttatgtcacagccctttttagtttgaggttagaaactgaccccggcgacaaagactctggtttttaaaacgtgcttcttaagcaaacttttccgcttaacgacaaaatatcccgaatggttaaaaaacaaccatccgggatatttttaggttatgctcaaagtttaaacgctcaagtcagcactctggtaaaaacgcgcttctggttgcaacaacttccgcttaatctaaaataacgaatgatgattcaaaaccaatcatcattcgttatttttaattaatgctcagttgctaaccgcaaccataagcactctaatttttaaaacatgcttaggctcacaggttcctgcgcctagctacgattggcaaacaaagtctaaacccagactttattcgccaaactaggctaatgctcagaagctgaccatgaagactcgcactctaatcaaagtcttctacttggtctccgcctacattttgccatgctcggcttaggaagtcgttattgatatcgtacttcactttaccggcttttttcgttgccatgaatggtttcaaagcttgatcgacttttaaccaaccacgccagcccaaatgaatggtatcttgcatgaagtaaggttgattgccatcctcagtcatatctgtaatatggttaaagccttgcgactgcagttggtaacgaactttctgatcaaaacgattcaacatcccttgtgacaacccagtgtaagaagcccagcgtgcattgactggtggaatcacgaattggacgtccattttatgttctgcaaaataggtcaacattaattggaaatccgcaaattctggtgaactttcgtaattaaaattccgttgaacaccctttaattgggcttcgtgtggtaatacccgttttttgtagaaatcatctttaatgccaaacggattatcgccagttgcttgttgacccagcgtcgttgccaccgtattcagctgcacatcatccgcttgtgccggtaatttttgaatgcccttttggacaaatttttcccgaccgtgaatgaataattgactaaataattgatcttgatgttggagtgctggtcgtttaacgttagcgatgtagactttttggggttgcgttaatggtaaacccaacgccttattcttcaacgcatcccgcacaacgccactcgtggtgtcactcgttaattgtaagattcgtgtcgccgtataacgtgtggccgccgtgttcttggcgtgcaacaagaaatacgatgtttgcaacggtgaatagaagaaatcgaacatattggctttgacccctttagggacaaaccattgtggcgaaacaatcaccacggctttcttaccattcaaatgattgccgctggcttggagtgataagaaatgcgttaaggattgcgtacccggcgcgccaattaaaaagggcttgttctgccaattatatttagtagccatgactgacggatgcaaaggatccatccgcgataattctgatgaaccaatcaccggaatataattcgcatcaaaagcggcatccttaatcgcttcacctttaatcacgttggccgacatcgaagtcgccgccgttgataacgttttggcacttggacggccaaaacgcaatggtgataataataaaaccattaaacctaatgcagcaaccagtactggtccaaatatgtgccataactttttaaacatgttattgaagttcctttactttagcgataattttattgggtgttgcccattcagtccgttcaaattcagaaactgggacttcgatgtctaattgaccttgtaattccaacaacatttggaccgttgccattgaatcgagtatgccagtttcaaataaatctaaatccatcgtgtcttttaaatcgtcattacccgttaagtccgttaaaatgtctaatactgtgttttcgatatccatgatgattaccccttttatattaaattagttttagtggaaccagagtttgtctaagaatcctgagaaaatcaagaaactaaagcaaacggtattgaacgttgcgaaaatcgctaggtagttggtccaacgattgctgataatctgatctttgtgcttcttcttaaaccgtaaccagacatcggttaaaatgatccagatggcgtggaatagcccgtaagcgatgtaataccacgttaagccgtgccagaagcccatcaataggaatagggttaagtaaccgagattagcgattaacacgcgattcttggtgaccttatgtttcatcaagaagaagactaagcgcatgtagatgtaatcgcggaaccagaatgataacgtcatgtgccaacgattccagaattccttaatgttcggtgatgcaaatggtttgttaaagttaattggcgtttcgacgcccatgatgtaactggtcccgatggcgaataaactataacccgcaaaatcaaagaagagatacagactgtagacgtacatataacccacaacgccccacgaaagatctaagaagcctccgcgactagccattgctaaatgcgccaatcttggtaaaagtagtgtgccaaagaaatagcctaagataaacttatacacaaacccgagcattaaattgtggacggctttaccgagcatttcaatatagtgatcccgatctggaatcttcagatagtctttcttaaagcgccggtaacgatcaatcggaccggatgaaatcgttggaaagaatagcatgaattgtaagaacaaccaaggttcgaactttttgatactgccatcccgcgtttccataatcatcccaaccgctttaaaggtcagataactaatccccaagaagccaatgattgaattactgcccggattgaggaacggcacaaacttaacaatcactaacggcataatcgccaatacgacggctaagttaaagagtaacgtgctgtttttcttctggcgataaacggtgtatccccagatcaatgccccttcgaacaagacataaccaatcagtgcataaccttgttcaatcttatctccgtcaaaaattaagattaaaaagattaatgaaacaagtgtttcgtagaagtgccaccgtttaccattcaaaaaaccaatgatcaacgggattaaagctgctcctaaaattaagaaataagtcggattcgcgtacggttgtaaattaggcattgccgttaacctcggtgatcaaagctttccgatcaaccttaccattgacggataatggtaattgcgtttgataaacaaaccgttggggaatcatgtaatccattgtgttttcagctaaggctgcttttaacgtcttcgttaaagtcgcatccccagtttgatccgcatttggcacgacatacgcaatcaattgcgtgacttgatgtgctttgttgtaacgcggcactgtgcaagcttgtttgacttgtgggagttgtcccagatgatgatcaatttcttccagttcaatccggtatccgtgcattttaacttggaagtcggtccggcctttgtagaagattagacctgattgatcttgcgtgaccaaatcgccggaatggtagaagcgttggccgtctttttcaaagaaagccgctgtcgtcttgtctgagttgtttaaataccctttcgagacacttggcccactgattaacaattcaccaggttggtcagctgcgacgacttggttttgttcatcaaccactaacgtcttcgtatcagacttagtgtaaccaattggtaaccgatcatattgcgccaagaggtccgccgtgatttcgatgctggtcattgcgaccgtcgcttctgtggggccataggtattaaaaatcttcgtttctgggaatcgttctaataacttcagcgcggtttggtgcgtcaactcttcaccacagaagacgaattgcgttaattctggatagtgttgactatcgaaagtcggtgctaataaacaaatctcaacaaacgatggtgttgacacccattcgttgactttcaaagtcggtaagacttcaaataattgcttaaagttattggtgacttctttttcaagaatgactaaggttgcgcctgagcacaaaccggggtataaatccatgaccgataaatcaaacgaatacggcgcttgaattaacactcggctattatcagcgactccgaaagtcgggttcgcccattgaacgaagctcaaaaggttgttttcactgatttgaaccccttttggtaagccagttgtgcccgatgtaaagatgatgtagaaattggcatccccgctgacctgttggctctgatcgtaatcagtggcaccagtcgcgatggtctcggctaaggttgttgccgaataaaccggccccttaacggtcaattgggcttctgggacccaagataaaacggcggctggttgcgcgaccgattcaatctgttgaatccgttcggcatccgaatgctgttcaacaggaatataagcgtgcccggctttaacggcccctaagaaagtcgcgaccatctcgaattgttgtccgccaaagacaatcacgggtgcccccgctggtaatgcttgggcttggatgaaatgcgcaatgcgatcagatgcggtttttaaatccgcatacgtgtgttgttctgcgccatattgataagccacggtttgtggttgattaattgcaattgtgtcgattcgttcaataatatgtgccctcatcatttaaggcctccttgatcagactaaaattcgttatagataaatttaggactaccgataccgctatagtcgtataaatagagtaggattaaaagaatcacaaaataaatgattgtcctaccgataaaattgacaattggctgctgccaaaaattaagaagtttttgtcccattttcaccatttccttctctaattgtgctgttttcattactattactatgtagataaagttaccacaacccattatcaacaaccactaacagttttgtcacacgaatgtaatatagcaaaaaagcagccttttcaaaatgaattcatttcgaaaaggctgctttaaaattaatcgatatattgtgctaaagtttggttcaattgttctttattatggaagccggtaattgtttcaacgactttgccatcttttttaacaatcaacgttggaatggccataatgccaaacttagcgggtgtttctggattagcgtcaacatccatcttaacaaattttactttgtcgttggtttgcgctaattcttcgatgactggggattgcatccgacaaggaccacaccaagttgcccaaaagtcagttaaaacaaccccttcatttgtttcagcttcaaaattcttatctgttaatgcttcaaccatacgatcacctcatttagattgttcaaaacctattatcacataatgctagtctacacgttgtagttctgaataacaactaatgtgcttacaaaaaatcagcattatttgaaagtgacaatcgtggccccgttgccgcccgcattagacggtgcatattcgtattttttaacttgacggttgccctgtagatactcttgaacaccttgacgaatcgcacccgtccctttaccatgaacaatcgtcacttgttgataattggctaacaaagcggcatcgatgtattgatcaacttcacccattgcttcttcataccgtttgcctcgtaggtcaagttgcgctttaacgtggcgcataccgccactattgacggttgtgacttggcgttgtggccgttgatcttcgaccactttttgtttctcaatatcggcactgtcaatcttcatcttaatgatgcccatttggacttcccaattgtgcgcatcaatttgacgcaatagtgtcccgcgttggccgtatgacgtaactaagacttcatcgccttctttgagcgtctgttggcgtttagcgcgttgtaagaccttatttttcttcaaggctgtttcttgatgcaactcattcaaggttgttttagcatcaatcaattggttttctttgatttgtgcgccctgattcaactgcatctggcgtaaattagtaatcaccttatcggccttttcctcagccttttccacaatttggttggctttttctttagccttcgtcatttcggtttcccgatcttcaaagaactgttgataagcggtgcttaactgttggtgtaaatcggtcgcttcagtgacttcataccgcaatgcttggtactccgtttcagcggctttacgttgattttccaaatcggtaatcatgttattcaaatcttggctgtcatcagtcatcaactgtttggcctgattgacgatactttctggcaacccaagacgcgttgaaatatcaaacgcgttactgcggcctggtaccccgattaacaaccggtaagttggttgcaaggtcgccacgtcgaattccatactcgcattgacggtttgaggccgattatacccgtaaatttttaattctggataatgggttgaagcgaccacattggccccgacaatcccgatttgatccaagatggcaatcgctaaagcggccccttcttgcggatcagtgccggcccccaattcatccaataggactaaactatggtcatcaatttgatccagaatctgaataatattttccatgtgtgccgagaaggtactcaagttttgttcaatcgattgttcatcaccgatatcggcaaagatatccgagaaaaccccgacttggctttcttctcgcgccgggataaataagccggactgcgccataatttggagtaggcctaacgtttttaacgtgatggttttcccaccggtattcggacccgttaccacaatcgcttgataatccgctccaatggtaatgtcattagccacaattttctccgcagcaattagtggatggcgtgcttgttttaaatcaacgtggttctcaagattaatcaacggttcagtcgctttgagcgttttggctaattgcgctttggcgttgacgaaatccagttcacctaataattcagcattggccaaaatttggtgccgttctggcataatcgcttcggataattcagctaaaatccgttcaatttcttgttgttcttcaatctgtacttgacgtagacggttatttaaatccataatcgcttgtggttccataaataacgtctgaccactggcactttgatcatggacaaccccaccaaattgaccgcggtattcttgtttaaccgggatcacgtagcggtcgttacgaatcgtcacaatcggatcactcaaatacttcgccttgctgccgtgcgtatagctatccatccgactgcgaatttgaccttccaattgtttcaagccagaccgcaagccccgtaacttcgtcgaagcggtatctaagaccgcaccatcatcagcgactgaactccggatgcgttccgtcaactgcggtagtgtgactaattgatcgaccaattcgggcagtgcctgtaagggcatttcacttttagcgagctcttcaaaaaagcggaccgttgcggaggttgcgcgcaagacccgacccagttgggccagttcgcgaccatttaacatcgcgccaatttcgattcgttttaaatggggccgcacgttttccagttgaggtagcgggatgccaccctttaaccgttcaatatcgacaccgtctttggtttgattcaacatgacttgaatcaattcggcatcattgattggcgcgagttgcgccactttttcctgaccaaaagcggtcaaaacgtgttcctgtaacatttttttgatttgctgatattctaatgtttttaatattttttgattcattctaatccaactcctttaaaaaaagtctgaccttaatcgtcagactcgtttactaaccagcgacccaccactgcgtaatctgtgaggttaaaatcggggtctttaagaccatcgttttagccacccacgagtgggctaatgtattttgcaagccgtcgattgggaccaatgctaacacgtataagaatagaaaaataccaatgtaaacgaccactaaactcaataaaccacccaacaatttgttaaactgttttaatagcggtaaataggtcaacgagttggctaataatccgactaagcgaaccaataagccaccgataaacatcacgattaaaaaggcaaccccgacgtaaaaagctttatccaacgataatcccgtgctcttttggaaaaaggcaaagtaactatcttccgttgcagaagggtacggcactaacaaactgagctgaggacccagtgtatgactaagtgtttgggcaatccaaaagacgataaaatacccgaccgtgtagaccatttgtaatacaaagccccggcgaacccccgtataaacggcatataacatcattaaaataattattaaacttaacatatgatccccttaaagacattcatcatttttaattaccgactatttagcacaataaaaatttgctagttcaactgaactattttatcatgaaataagcaaaagtgacaatcttacccatttatctgtcattattcagacctggaggccattatgcaagctgtgattcaagtgagtcccacccaattaaaagcaattcaagcacaatatccgactaatcgtcaattaccccctggtgcagtttttgcccacaaggctggcagtctcagtgtgaccggctatcgttccggcaaagtcctttttcaagggactggtgcccaacaagccgctcaacagtggggctcagttgccccggctaaatcagggacaaccaccccaaaaactaaaaaggccaaaggcgatcaactcccacccgattttgccagttgggccgtgctcggttctgatgaagtcggcaacggtagttatttcggtcccctaacaattgccgcggtttacgtcagtcaagccaacctcgatttcgtcagaggtttaggcgtcgccgattctaaaacattaaccgatcagcaaattgatcgaatggccatccagatgatagaccgcctgccccaccacatcgtcaatattatgccggccaaatacaacgaagttcacgagaagatgaacatcgaaaaaatgaaggcgatcagccataattttgccttattaaaagttttaaaacagattcaaccagacaaaccagccgggattttgattgatcaatttgaaccacgcgatatttattatcgctacttgcaaaaagaacccctagtcgtccgcgaaaatgtttatttctcaaccaaagcggaacaattccatctcgcggttgcggcagcatcaatcatcgcgcgccaccgcgccaacgttgcgatgcaagaactctcacaattagctggccggacaatcccggtcggtagccataaagtcgtggaccaaatcgccgccgatttactcgccaaaggtggcctcgactatttaggccaattcgccaagttgcatttcagcaacacacaaaaagcacaaggactattaaaatgagtgctaactcagccggttaacttctgagtatagcctagaattgtgaattatgactgattttagtcatgatttgcgattcgtagctaaacggaagaagttggctgagaagcacgttatggcagaagtgctggaacccacggcttgattccgagcattagcctagtttcgtgaataaaggccgccttttggactttgtttacgaaacgtagctaagcacaagaatcagtgggtgcaagcacgttatcgtatgagtgctgactcgagcggttaatcttcgagcataacctagaaatgccaattatggtcgaacttaaccatgattggcatttcgtagttaagcggagaagattgctcgagaagcacgttatgatctgagtgctgactcggccgggaacttctgagtatagcctagaattgtgaattatgactggttttagtcatgatttgcgattcgtagctaaacggaagaagttggctgagaagcacgttatgacagaagtgctggaacccacgctttgattccgagcattagcttagcgaataataaaaatagcactttaaccaattctggttaaagtgctatttttattaatgctcagttgcttaccgtaactcacagcactctatccaaaacgtgttcaatccccacagctctctgtgcttagcgacgtctagcaaacaaagaccaaaaaacgatctttattcactagactaggctaatgctcgaaagctcccgtggggttgaacactctatccaaaatgtgcttctcaagcaagcctctccgcctagcgacgaaaaagagtgaatgcccaaaattcaggtcattcactctttttctaggctatactcagaagctacccgggttggcagcactctattgcatgttgtcgtctgctaagaatgtgtttaagacttcttccaccatttcccattcttcatcgtcttcgattgggaataagtcgccttgactggcatcgccttcaacgtctgaagtgaatgcaaaagcttggatatcaacttcttcatcatcttgtgcgcttgctgggtatagtaacacgtatgacttaccgtagtcttctgaatcaaacgtgaagaggacttggtataattcttcgttaccttgatcatcaattaatgtaatttcttgttctgcatcttggtggatgttcttattttcgtcagtcattcatcaaaactccctagtgattatatttaaatgcgtctcgtggaccatttagtgtttacaatttcgttaagcgaccatgcgcatccaaataattttgtaaaatcatgacagctgcgagcttatcaatgacttttttgcgcttcttgcgagaggtatcggcttgttcaactaacatgcgttcggcttgaaccgtcgtcaatcgttcatcaataaagtcaaccggtatttctggaaaaagttgttggagcatttcgccgtactcttgggctttaatcgcccgcggaccaattgaattattcatgttcttgggtaaacccaaaacaaagccggtgacttggtgttctttgaccagttctttaacccggtctaacccaaactcagcttcatcttcgttaattcgaataatttcaacgccctgtgctgtccaaccgaacaaatcactgacggcaattcccaccgtacgtgaaccaacatcaaatcccattaaccgcattatttcgtgtttcctttatcaagataatttttgacgagttcttcaataatctcatcacgttcatgtttgcgaatcaaattacgcgcatcgttatagcgtggaatgtaagctggatcccctgataacaggtatccaacaatctggttaattggattatagcccttttcttctaaagtctgataaaccgtttctaatgtttcatgaacatttttcgggctattcttaccgaaatcaaaatggactgtcttatctagattcatctctcaacacctcaacttttcgctacttatacaaccatattctactcgaaaatagcctaaagtacaaccaacacgattatcctgtaacaactttgtaaagagttactatcacatagctgtgacaaaatgcgattatcaagtcagaaaaatggcctatcctgttttaggaatagaccatttttcgatttgaacggaaattgatgcgttatggcgcgcgttgaagcacaaccgtcatttaatttagattcctttaaaataatgctggcctcaatttttgacctatttcattaaaaattcttgcgcagctgtcaatgcggctggaatcccgactgggttcttaccaccggcttgggccatatctggccgaccaccgccaccgccaccaacaaggggtgcaatgtgtttgattaaatcgcccgctttgatgccggctttaattgcagctggtgcaacagcgacgattaagctgaccttatcgccagcaaccgttgctaacactaagacgtctgagatagctttttgttgccattgatcggccaattgacggagttcattcatccccgccactttagcgtcagcagccactaagcgccattgacccgcttcaactacgttttcaaagacgttaccggcttgttgttgtgcaaacttcgcttttaattgttcattttctttttgttctgcttttaaatcactttgtaattgttgaattttctttggtaaatctttgacttgagcgacctttaattcgccagctaattgattaagtaacgcttgtttgtcgttgagataagcaaaagcggctttcgacgtcacagcttcaatccgtcgggtgccagcaccaatcccagattcacttgtaatcttgaagaggcctaaatcagacgtattgcgggcatgcgtcccaccacaaagttccattgaatagtcaccgattttaaccacgcgcacggtcttaccatatttttcggtaaagagcgcaatggcccccatcgctttagcggattcgatatccgtttcaaccgtgttaacgggcagtgctgcccaaatttggtcgttgacgatttgttcgacttcagccaattgttcagtggttacttgacccaggttagtaaaatcaaatcgtaaatagtcaggttcaactagcgaaccagcttgatgcgtatgctcgcctaagacgtcgcgtaaggcttgatccaataaatgagtggccgtatgattcttgatgaccccaccccggaaagttggatcaaccactagcgtataatggacgccacttaacatttcatctaggactgtgacggtatgcaatggttggccgtttggtgcgtattgcacgtcagtcactttagcaaccacttgccctgccaagtttttaacaatcccttggtccgcgacttgcccacccatttcagcataaaatggcgtttggtcaaaaatcagttgcgcttggccttcgctaatcatcgtttgtttcgcgttatcttgaatgataacggccaatttactatcggttatcaattcagtgtaacccgtaaattcactagcgaccttaatgtccaatagcaattcgttttgagtccccattgattgttcgtcactacgggcattccgcgcccgggccttttgttgcgccatttcggcttcaaaaccggcttggtcaatcgttagtccttcatcttgcgcatattcagttgttaattcgattgggaaaccaaacgtatcaaataatttaaacgctgcggcacccgtaatttcagtttgaccagcggctttaacggccacaatcgtttcgttcaataaccgcaacccatcatttaacgtttcgcggaaacgatcttcttctgaacgaatgactttttcgataaagtctttttgcgctaaaacatcaggataatagctaaccatgatgtcacccacgattggcactaattgatacataaacgcatcgttaatgcctaacttcttcccattcaaaatcgcccgccggattaagcgtcgtaacacataaccgcgaccttcgttagatggcatcgcaccgtcaccaatcgcaaacgtcactgcgcgtgcgtgatcggcaataattttgaacgcaatatcgtcagctgtgtttttgccgtattgtttatggtcactcaattttgccgtggcttcgatcagtggcataaatagatctgtttcaaagttcgttggggcttcttggatgactgaaaccaggcgttcaagacccatccccgtatcaatatttttatggggttgttcaacatattcaccatttggtaaatgattgaattctgagaagacaatgttccagacttccaagtaacgttcgttctcgccgccaggatagttctctgggtcgtcttcagccacattgttgaatgattgaccacgatcgtaaaagatttctgagtcgggaccacaggggccttcaccgatatcccagaaattatcttcaacttcgatgacgtgatcagccgacaacccgactttttcaagccaaatgcggtgcgcttcttgatctttagggtaaaccgtcacgtataatttagcgggatctaaaccaatccacttatcgctcgttaagaattcccaagcccaaggaatcgcgtcttccttaaagtaatcaccaactgagaaattgcctaacatttcaaagaaagtatggtgacgcgcagtcttcccaacattttcaatatcgttagtccggatactcttttgggcgttagtaatccgtggattttcgggtaccacgcggccatcaaaatacttcttaagcgttgcgaccccagaattaatccacaatagtgttggatcatcgtccggaattaatggtgcactcggttcaacatcatggcctttttctttaaagaactctaaaaacatttggcgcacttgggcgctcgttaattttttcatctaaattctccttcaaaataataaaacaccgctgcaaattcaaggacgcataagcgcggtaccaccttgattgcaacgatgttagtcgttaacctctttatgagtttattgaattgttgacggttggggagcacgctcatcgacgccgttgctttctctcaatgaatccaaagcatccctgtctacattgctgatgaggtatatcccaacacttccaaagtataaaaaataatcacgagattgtcaactactcgagcacgattggaatcgtccgtcgatattgacgaggcacctgtacgtcttcaatgacctgcgttgccagccccgattcataaaacggcgacgtcggcaacacctgttccagttggtaccggccaccggtgacacacgggccacccttatagactaacggatcattggtcaattcgtagcgtcgttgcccatcaaaatcaagaccaaatgactggtgcatcaattgattggcggttggtaaatgattccccgcaacccacagactagttgtgcccgcacctttaagccattcatattgatccggactcacaaaatcgaatccttgttgatgcaacgtctgtttaagcgctagttctgacaaattaatcttttcaaacacttggtaggcttggtgctgcatcaatggtttaacaattaaatggcgactttcaaaataggccgactggctttcccgttgccggtaaagcagattttgcagttcggcttgatactgccgataaaacaattgattcccgctaaactggccattgaccaaggtataaacgccttgcgctaaccagtcaatcggttgggcagcttgtgcgaccaataacgcaggcatgttaaccgtccggttgtctgaagtcagttcattaacatagtcagaaaccgcctcttggttcgttaacacaatcccctcatcggctttaagtggtcgatttgattgtgcaaaccattcgttgggcgttagtttcgtcgccccggctgaccaacctaattggacagctggttgccctggaataaacaaaaactgttcgcccaacaaccagacactataggtcttcaaaaccgtctgttggtagtcaacttttaccggctcaatccaatcgactgccactagcggactaacaaaatagcgtaaaacttggccaaaattagcccgccgatcggcttctgataattgttgccattgacttaattgcaaatcgaattcatgcatttatgccaccccaatcataatttgactagcgtttattacgagctttggtttcccgttttttctcacggagttcaacccgttgttcaacccgccgtttttgacgcgcgtctttttggattgcttctttaatctttttcttataacctggtttacgttttagtttggcctttttgaccatcccttttaaaccaacgtctaattcatgggtgctagccgtccgtttcttccgacgattacgatcgtaagaagtgactaattcgccatcttttaatactttcggcgtaaacttgatgcccatattttcaatctgcgcaaccgcattttcatcttctggaccgtataacgtgatggctgttccggctaaaccgttccggcccgtccgacccactcgatgaataaagaattctaaatcttcagttgggatttcagcattaatgaccatgctgaccccttcgatatcaatcccccgggctgctaaatcagtggccacgacgtattgataatctaaattatgaacttctttcataacgcgcttacgttgacgtggtggtaaatcgccatgaatcttagcaactttcaaaccttgtgattgtaagtaatggtgaatatcatcaacgcgactcttcgtattagcaaagatcaacactaagaatggatggcccatcgtaatcaacgtgtagattgtttgattaacggccttgcccttagttggcaataaccagttttcaatcgtggggctaatcacagattcgttcttaacttcttcgatcaccggattgtgcatgtatttttgtaaaaatggttgtagcttgtcaggaatcgttgctgaaaagaccatcatttgtaggtcttctggtaaacgactggcaatttgatcgacgggtttcaaaaagcccatatcaagcgtcatatccgcttcatcgaccactagaatcttagccgtgtaaatctttaaggctttactttcgattaaatctaaaatccgaccaggcgtcccaataataatttggggttggtgttgttttagtttttcgatttggcggtgtttatcggtcccaccgacatagcgaccaatccgaatttcaactgaactatgtttggcaatttgttcagccgccgtgtaaatttggtacgctaattcacgactaggcgctgtgatgacggcttgtacttcatctttttcagcgacaattttgttgaagattggtaataagaaggcgtgggttttaccactcccagtttgtgattgaccaatcacacttttaccagcattgatgacgggcatgacgcgccgttgaaccgctgttggtttggtgaaatgaatttcatctaaagcttcaataatttctggctttaaattaaattggataaattgattttccataaaatcctactttctattttaaccgcgctactgggctgcttggtacgcatccgcaagcgctgataattctgcaataatctgttcaatttcagcttgatccgccgcattggcgccactggccattggatgacccccgccagcatgttgtttcgctaattcgttaatgaccggtccttttgaccgaaaatgaacgcgataagcgccgtcgtcttgttcgacaaatgtcacccaagttaagaccccccgtaaccggccgggtgtcccgacaatcgaatggacctgttgggctgacacgtgtagccgtgcttgagtcgcttggctaacaacgagataggcaacatggtgttgattgacctgtaattggtcaaacaagtacccttgcaacttggcctgttccaacgtgatttcattcatgcgttgattaatcttagcatgttggatatcaaacgtcatcatttgagcggcacaattcatcgtatgtgggctggttgaatcaaacatgaaacgtcccgtatcaccgaccataccggcgtatagaacacgagcggcagcatcgttgaattgcaaacgaccctgactatcattaacgatgtcgataataatttcggaagtacttgaagcgtcaggtaagacccaattcaaatcaccatacggatcatcgtttggatggtggtcaatcttaatcaggtacgcgccatcttgataatgatcgtcactaattcgtggtgaattggctgcatcggtcgtaatcactaaagccccttgataggtcgcttcatcgatactttgaacgtttgccagccaagccaaatcgccggtatcactacccacttgatagacttttttagttggaaaactattccgaatgacttccgccaatccaacttgtgacccaatcgcatcgggatccggatgaacatgccgatgaataataatcgtgtcataggcttcaattttggcaataatttgttctggaattgtcatggttaacctctttctaaaatctgacaagtcacaatcgctttagcaaccataacatggttcgcataaatgtccacatctactttagctgaacgacgaccaatgtctaataatcggggcaaaattttgatttgactttcaatttgaattaaacgtaaataatgtaaattaacctgttcaatcatcgagtggcgtttatactgagtctgcaacatccgttgacaggcagccgagacggtttcgctcaaaacaccaaacgaaatcgttcctaaattattagtcatttgtggactgacttcaaactggtacgccgccgaataaaattcggaatcaagatcatctggttggattaattcgacaatctgatcgtaaaaggtttcagctacttgcggttggcgttgcgccgtctgcatattggccatcacgtcttgacgggtgataatcccttctaattcaaggttatcagccactaccggcatcatttctaaactattccaagtcattgaatgaccgacactggcgacgctcatatacttcttaacactcgacgggttcttcgtcatgaccttatccagctgcatcgtcgttggtttgtccaagatatccttaatcgtgacaatcccaaccaatcggccgtgttcgttaaccactggaaaacgcgacatgttgacggccgcacttaactgcttataatcacccacggtttcggtcgccagtaacgaataagtatccgccaagggatggtagatgtcagcaactgtcgtgatttcctttttaattaattgatcggtcaaagcccgattaattaacgtgccgacggtataagtatcatacgttgtcagtagaatcggtaaggccaattcatcggccaacgcgacgacctccggcgatgtttgtaacccaccggtaatcaacacggccgcgccattttcaagcgctagtcgttgaacgtcctcgcgatcaccaacaatcatcaacgatttaggggtgatataccgtttcatcgcctcaagttgcatcgcaccaatcacaaatttatccaataatttattcaggccggctttaccacctaacacttcaccatcaatcacttgcacgatttcagcgaaggtcagattttcaatcttgccttttaatttctgttcaatccgaatggtgccgactcgttcaatcgtgctgactaagccgttattttcagccgccttaatcgcccgataagccgtaccttcactaacatccagcgttttggcaattgagcgcaccgagatcttatccccaattggtaaattatcgatgtacgttaagatctgatcatgtttagttgtcactcaaaagccaccgcctttcaattatttaataatcggcatacttatctatagtatatcggttttcatcgctaaaaacaaagtaaactcgtcaatcattttcccaatcataaagtggcagcgtgatattttcaaaagtttgcggtgccaagtttgtgacggtaatccctaacagacgaatcccgacttcagcgtgcccgatgctcgaccaaatttgccaagcgatagtttccaattcttgtgcactaccgacgtattcacctaacgttttacgtttcgtaatcgtttcaaactggcgattacgaaccttaacgaccaccgtttggccgtgcttttgatttttacgcatgcggacggcgacttctgcggcaatcattttcaattgggcttgaacctgttcttcactaatcaaaggttgcccataagtgtgttcgttgccaatcgatttacgttcacgttggtattcaacaggccgattatcaacgccacgcacgtgccgataaagcccataaccaagtttgccgaagttttgcatcaacatcatttcagattgtgccaataaatcagcgcccgtttcgatgcccaactcttgcattttgacggccgttttttgaccaaccccgcgaaatttttcaatcggtaaccgcgttagaaacggaatcgcttgttccggtaagactattgttcgacccgccggtttacggtaatcagacgccatcttcgccagaaatttattataggaaatcccggcagaactcaccagttgggtttcttccagaatggccttttgcaaataagcgaccacttcaatcgtatgcgtaaaacctaacttgttctcagtgacatccagatacgcttcatcgaacgcaatcggttcaattttatcggtaaccgtgtgaaatatttcatgaatttgttctgagacggaccggtataacggaaaatcaggcgttttgaacaccgcctgatgttttggaatcaactcggcggccttttgcgcgctcatcgccgaatggacaccgtattgacgcgcgacataattggcagtcgtcacgacccctttgcctcccgtatcacttggattacgggcgataatcaatggctgccggcgtaattccggatgttcacgttcctcaatcgacgcataaaaagcgtccatatcgatatgcacaatcttgcgactcgtatcattgcgcaatggtattttaaacaattccgccatagtggtccctcctctcaaaaagaaaagcctacgcttcacacgcaggctcgataaaattcacttatttagattgcgttggatcaaaaatccattccgcaccagttgattggactagctcagtcgcttctttggggcccattgaaccgattggataagttggtaaagccgtttgatcagcatcccaaactttccgaatcgcatcaacgaactgccatgaagccgctaattcacgccagtgcgtaaagttagtcccatcgccattcaaagcttccaaaattaaacgttcgtaagcttctggactgtcggctaacatttgttgattatattgataagccaattggccagggactaattcaaagccttgtcccacttttttaccgtttaacgttaacgcaaaaccttgttcaggttcgacaaaaatcgttaaaacatcgggtgcgactgctgattgatcatttttatcaggtgcaaaaatattaacacccgtctttttgaagacgatattaatttgcgtttctttacgcgctaatcgtttcccggtccggacgtagaatggcacaccacaccaacgttcgttgtcaatcaggactttaccagcgacaaatgtttcggtttgcgacgccggtgcgacgttcgtttcttgccgataccctggttgcgtttgaccctcaaccggcgtttcgccatattgggcccggacaaaattagttttaatttcggccggtgtgtaaggctgaatactcttgaatagccgggtcttttcccgttggacatcttccgctgagaaactaactggcatttccattgctagcatcccaatcacttgcataatatgattttgcatcatatcgcgcaaagcaccggatgtttcataataaccagcccgatcttcaacacccactgattcagcaagggtaatttggacgttatcgataaattgcttgttccaaacggcccccaataacccattgccaaaacggagcgccataatattttgaatcatttctttacccaaataatgatcgatgcggtaaatttgatcttcttcaaaagtttgcgttaattcatcatttaaaattttagcactatcgtaatcacggccaaatggtttttcaatgatcaggcggttaaaaccatccgccgtcaacaacgcttctgaccctaaatggctcgcaatggttccaaagaatcgtggtgacatcgccatgtaataaattcgattttgttgcagttgatattggtcatccaatttagcggctaattgtttcaacgtttcgtaatgttgggcatcggtcacatcgtgtgattgatagtagaaatggctcgcaaaggtctttttaaccgtttcatcagcctcgaaaccggctagcgaagtcataataatctcatgataatgttcgtcactccaaggtcgacgtgccgttccaatgactgcaaaatgttcttttaaataacccttttggtagagattaaataaagccggatacaatttacgttgcgctaaatctcctgaaccaccaaaaataataaataatgctgctaaatccgtacgcatattgccaccactttcactcgttaattaagtttatctcacaaaaatatgttgggctgctttaatcccaacttgaatgtcatttttagttgtttcatcgtacaacgtcaatgagctttcaaacaagccaacttttttcaaagtcacagtgtcgccaaccgataaaccaatttcaatcgtatattgcaacagttcgttatcgtctagaacccgttctaaaacggctgtctcgcccaattccatcgccactagcgcacgattactttgtttttcaaactcgccacgtgcattgggaataatgccgccatgcggacaacgcgttggatgccctaagaaatccgctagccgttcagctaaaccaggatttgtcacatgttccaattgttccgcctctggatgaacattattaaattgataatccaatttgtccactaaaaagacttcccacaaccgatgattgcgcactaataaagccgcttctacagcgccttctttcgttaattgaatgccttgatagggcgtatgggtcacgtagttttccttgaccaacttattgaccatctcagtcacagaagccgccgaaacgctcaaccccgccaatatttctttattcgttacttttttagtgtcgccacccaattcaaaaatgatttttaaataatcttctttatttggtgtcataacaatcccgatccttgtttaatttgacgacaaacttttcttagtcatcctttaaccaaatgaatgtctactttctattatgccttattttgcagaatattaacactctcaagtgtcaaatttatcgaacaaaatcacgaactacttaaactactgatgaaccgaaataatcaaaaccacgtttctcaagtagccttttccggttaacgataaaacaggaatcatgagcaagagaccgctcatcattccaacaacttctgcttaatttaaatagcgtatcatgactgaaaatcgtcataatacgctatttttgttaatgctcagaatctaccgtgcggcgtcgcactctgccttgaaacgtgtttttaggttaatcctcaaagcctgaccaacttgagtcagcgctctgttctgaaacgcgcttctcagccagcttcttccgtctagctacaaatggcgcataatgactaaaatcagtcattatgcgccattttaggctatactcagaagctaatcggctgagtcagcgctctaaaattctgcttccaatattgcctttaattccttgattaatggttcttttggattcgttaccgtacagttatcttcatacgctaattcagctaaaccgtcgacgtgtttgtcgaaatcagctttcttaatcccattttcgtgtaggctcatttgaataccgacactttcagctagtttcgtaacagcttgtgcataagcttcgaccaattcggccgttgtattgcctttcaagccaagataacgcgcgatttcagcataatcttcatcggctctgaaatagctatacttagcccatagtgcccgtttggttggtgttttcgcgttataacgaatcacgtgtggcatcgtgatggcaatcatcaaaccgtgaggcaagttgaatgcgccacctaatttatgtgcgatcgaatggttaatgcctaacaaagcgttggcaaatgccatcccggccatcgttgaagcatcgtgcatgttccctttggcttcaatgtcgccagcgtaactattttgtaagttatcaaaaactaatttaatcgcttgtaagctaagacccttcgtgtaattagaggccatcgttgacacgtaactttcagtcgcatgacataagacatcaatcccagtattggcaacaacgcgtggtgggacactttcaacaaattgactatcaacaatcgcaacatctggcgtcaacgcataatcagccaatgggtatttaatgtgcgtttcactatccgtaatgacggcgaatggtgtcacttcagaacccgtcccggaagttgttggcacacagattaatttcgttttgttcaatttagggaacttgtaagtccgtttccggatgtccaagaatttttgtttagcgccaaagaaattagcatcggctgaatcgtagaataaccacatgcctttagccgcatccatgacggaccccccaccaattgccacaattgcgtctggttcaaagctgcgcattgcttcggcacctttataaacggtgttggttgatggatcaggttcaacgtctgagaagacttgcatttggacttcgttcgcccgtttagcgaggacttcttcaacaattcgaacgtaaccgaggttaaccatgccttgatcagcaacgataaagactttgtttaagccgtccattttttcaagatagttaattgaattcttttcaaaataaattttacttggtaatttaacccattgcatattattccgccgtttcgttaacgtcttaacgttcaataaatcaatcgttgacacgttatgtgagattgaattatggccgtatgatccgcagcctaaagttaatgatggaatcatttcgttatacaaatcaccaatgcccccttgtgcggatggtgtgttaaccaaaatccgacaagctttcatgcgtttggcaaattgtagtggtaattcttggtcagtcgtatgcaatgacgccgtatgacctaaaccacctaaatctaacattgcttcacacaagtccaaaccgtcttcacggtctttcgctttaatcatcgccaaaacgggtgataatttttcatgagacaatggatattgatggccaacacccttaatttcagcaattaaaacgggtgtatcttccggaatatcaagaccagccatcttggcaatcttagccgctgattgaccaacgattggtggacgaaccgcatttttagcaggatcaatgatggcttcgttcaaggctggcagttcacttgatttcgcgaagtaaacgccttgcgctttaaattcttttttaacgtcatcataaatcttagcatcaacaatcactgcttgttctgacgcacagatcatcccgttatcaaatgatttcgataaaatcaaatcattaacggcttgtttgatgtttgctgattcttcgatgtaggctggcgcattaccggccccgacgcctaatgctggtttcccagttgaataagcggctttaaccatgccaggtccaccagttgctagaaccgtcgcaataccaacgtgattcatcaacgtttgcgttgcttcaatactaggttgttcaatataaagtaaggcatccgctggtaagccagctttaacggcttcttctttaatgacttctaaagcgcgaacagaacatttttgtgcgtttggatggaatgcaaaaataattggattccgcgttttaatcgcaatttctgatttaaaaatcgttgttgacgttgggttggtgactggtgttacccccgcaatgacgccgacgggttccgcaatcttcgtaatcccgtgttcaggatcttcttcaatcacaccaactgttttattatctttaatcgcatgccaaatttcttcggtagcaaacatatttttgatggctttatcttcataaattccacggccagtttcttcgacagccatcttagcaagttccatatgatggtctaagcccgcaattgccatttggtgcacgatatgatcaatctttgcttgatcgaatgtttctagaattgccaatgctttatgagcgcgttcaactaaatcagtcaccattttatcaatatttgattgtgttttaacaacttctttaactgtttctttcttgaccatctgtttgcctccgctaatttaaaaattattgtgatttatttaacaaagaaattgtaccgcacatttgaatcgttgtaaacacttttttgtgatttttttaacagaatataaaacgattccatttcagttataccgtttttaaattaaatatcagcactacattgtggattaaatcacttgccattaggcttaacggcctttttgaagcatcaaaaaaagaggctatactcagaagctaaccggttgaatcaggcacttcaatttttaacgtgcttctcaaccagcttcttccgtctagctacaaatcgggaatcatgaccaaacccagtcataattcccgattttaggctatactcagaagttaaccggttgaatcaggcacttcaatttttaacgtgcttttgaattgcaacaacttccgcttaactaaaaatcccccaattatcttaaaatcaagataactgggggattttctgttaatgctcagttactacccgcaactcaacacacttactgttttaataatctattttgtgtcgtcttttgaatcatcagttgtcacgtcttcagttgttgcttcagtaattttttcttcaacaacgggtgtttcagtcgttgcttctggtgtcacgttacgaacagcgcttaaattaaacttcaagtaaacgccatcgcaatctaagacaacggttttagcgtcagtgttcactgaatcaatcacaccgtgtaaaccaccaattgtaatgacggcatcgccttttttcatttggttaaccatttcttgatgtttttgttgttgtttcttttgtggacgcataaccatgaaatacatcatcgccatcatcaaaattaaaataataaagaaacttgaaccgccaaaagcaccaccggcacctaatactaaacttgtcatcaaaaataccccttttcattattaactatctttaactgtagcaaaattaacggctaacttccagtttattcgctagaaattacgaccattgtcattgttataaccatattcttcaaaaaaggccgcgcggaactctaataaattatcctgttcaatcgcatcttgaacctggtgcatcaaattaatcaagaaatacagattgtgataactcgttaaatgaatcccaaatgtttcatttgctttaatcaaatggcgaatgtaagcccgcgtataatttttacaaacatagcaattacattttggatctaatggtctgaaatcttcagaatacttcgcatttttaacgactaagcggccttgcgacgtcatcgttgtcccgtttcttgcaatccgggttggtaaaacgcaatcgaacatatcgattccacgaatgacgccatcaattaaagcatctggcgaaccaacccccattaaataacgtggtttttcttctggcaacattggcgtcgtgaaatcgagaactcgattcatttcaccctttgattcaccaaccgatagaccaccgatcgaataaccggggaaatccatccccactaaatcacgggcactttgcttacgtaaatcttcaaaaccagcgccttggacaatcccaaataagccttgtgttgcaggattttgatgggcaattaaaccccgttctgcccaacgcgatgtccgttcaacggattttttgacgtaatcataactttcgaagaacggtggacattcatcaaaactcatcatgatgtccgcacccaatgcgttttcaacttgaatcgctttttcaggggataaaaatagtttttcaccactgaggtgacttctgaaagccacgccatcttcactgatatcacgtaacttcgccaatgaaaagacttggaaaccgccggaatcagttaaaacaccgcggtcccaattcataaatttatgcaaaccgcccgctttttcgacgatgtcttcaccaggtcgtaaccacaagtgataagtattcgataaaataatgccggcgcccatttctttcaaatcttcgggagccattgttttaacgctggcttgcgtcccgactggcataaacattggtgttttgaaagtcccatgcggggtgatgatttcacctaaccgagcacctgtgtgtttttcttttttgattaaacgatatttaatcgctggttccatttaatcgactccaattctagtatttattcttgcttcattttagcagacttccccgattaagcaagaaaagccgataagcaaataacttggttcccctaattggagatgttatattaaggttatcgaagggaggtagaaaatcaagtgaacttctcgtagtatggacccaacttatcgttggggtttgttagtcatttactcgtcgttgaagcttgtagagttcgtcctccgaaatgctcatccattaaataagactgaaccattttagaagtgtgtgtctcaaaaacaaaaagttccctagatctttacaagttgttgattcacaaatcttgattttccccttctgtactgcaaagccaccaggttctgacgagaagacctggtggcttggtcgtgtcataaaagcaaagagagtaatgtgtgaccccctactggtcagcattgctctctttgcttttggttattttaatatcatttgataggcataacgtttaggggaaggatcattcgcaatcagaatatccccgcaatacgtaaacccagccttttgaatcacgtgttgcatcgttaagttgtccggatgcgtatcaattctgaggtccttagcgccacgtagactagccgccgtgattaacaacgtcatgaattgactggccaaatgctggccgtgtaaccgactagttaatgccacccgatgaattgaataatagagtgagcccaccgtctgccactgaccgttagtgatggcttcatagccagcgtcttcagtttcaacgattgacgcaaccccaacgatttgtccctcaatgattaaaacaatacatagttcttgtcgaatttcattttcaaattgactctgactcggttcttcagcttgccattgattgatatcatgctgctttaaagtggctctagcctcttcaataatcgctagtattgcgggtaaatcgttaaaatgcgcttttcgtaaatacattgaacgtcctccctaaaaggcaattacttgataaacatcgcatcgccaaagctaaagaaccgatacttttcatcgaccgcatgtttgtaagcatttaaaatatgttcacgaccggtaaaggaagccactaacatgactaaagttgattttggtaaatggaaattcgtgatgaaaccatcaaccactttccattgataaccgggtttaataaagatttcggtccaaccactatccgcttttaattcaccattaaacttcgtcgcaatcgtttcaagggtccgaatactggtcgtcccagtcgcaatcactcggccaccattttgatgaacttcatttaacgtcgcggcagcttcttcggttaatcggtagaattcactgtgcattttgtgatcttcaacattgtcttcagaaacgggtctaaacgtcccgagtccaacatgtaaggttaaataaactaatttaatccctttgtcttggactttttgtaataattcttccgtccaatggaagccagcagttggcgccgctgctgaaccgggttctttagcgtagactgtttggtacatttctggatcatctaatttttctttgatatagggtggcaacggcatttcgcctaattcttcaagaatttgcatgaaaatcccatcatattggaattcaatcatccgaccgccatgttctaattctttcgttacgactgcttttaattgaccatcaccaaaaaccacttcagtgccgactttggcccgcttagcgggtttcatcaagacttcccattcatcgtcgtgcgtgttatttaacaacagcacttcttcatgaccacccgtatcgggtttaacaccgtataaacgggcaggcaagacgcgggtgttgttcattacaacggcatcgccgggatttaattcatcaatcacatcgtagaaaactttatcttctaacgcgccagtcttactatccatcactaacatgcgtgatgcggcccgttcagtcatcggtgtttgggcaattaattcttcgggtaatacataatcaaaatcttctgtagaaaccatggggagccttctttctaattttctggataaggtaaacctaaatgcgtgtaggcggccaatgtgaccacccggccacgcggtgttcgttttaaaaaaccaatttgtaacagatagggttcataaacttcttcaacggtttcaatttcttcaccgatattggccgcgatggtttttaacccaactggcccaccttgataatagtcaatcatcatttttaaaatcttacgatcgatactatcaaggccgcggatatcaatctgcaattgtttgagcgcgtgatcagcaatcggttgatcaatcgccgcttgatcggcaacttgcgcgtaatcccgaatccgttttaataaccggttggcaatccgtggcgtcccccgagaacggcgcgcaatttctaacgcgccgtccgggacaatcgccatattaaagacaccggctgaccgttcaacgatgtcgactaaatcggcttcctcgtagtaggccatgtgttcgacaatcccaaaccgatcacgcaacggcgcggacaataagcccgcgcgggtcgttgcaccaatcaacgtaaacggtggcaacggaaaatgaaccggatgtgccgttggtccttgaccaacgatgatgtcgatgtagaaatcttccatcgcggaatacaataattcttccacaattttaggtaagcggtgaatttcatcaataaataagacatcacccggttgtaactcattcaaaatggccactaaatcaccggggcgttcaattgcgggcccactggtcgtgcgaatttggacttgtaattcattggcaatcaccatcgctaaagttgttttacccagacctggtggcccatatagcaacacatgatccagtgactcttcccgttttttggcggccgcaatataaaccgttaattcatttttaacccggtcttgaccgatgtattgcgcgaggacttgtggccgcaacgttttttcaatacttgcttccgcaaaatcagtattctcagcggaaacaattcgttcttctgccatttaaagtcctcctttattttttcatcaataaccgtaacccttcacgtaaatactgatcagtcgtttgcgcactgaaatccgtcaatattttagtgatacttttaacctcgcgggccgaataaccgagcgccgttaacgcttctagtgcatcggttaattcaggtgaagcacccggtacccctaaatcaatcacggtttgcccggttaatttctcggtttgttccaaatcacctaatttattttttaaatcaagaacaatttgttgtgccgtcttcttacccacgcctgggaacttcgttaaataactaatgtcgtcattcatgatggcttgaatcaatccagaatgatcactgttggctaaaatcgctaagccactcttgggcccaataccagacacactgattagcttctgaaaaatctgtttttcatctaaatcatagaaaccaaacagcgtgatatccgtatcgcgcacagcttggtagacgtagatttgcacaatttcatcgttggattcggtgtagcgataaggattggcgacctgtaattgatacccgacgccttgaacctccaagaccacgtaatacggattgacggccgtcacgagcccttttaaatattcatacatacttttacctactttatgagaacgtatatttgctttttaaattgtaacacaaaagcgcgccggtgttgcactcaattaccggtttagtactggcgcacttttggtggctgatactctgtgatgaaggtcgccatctcggtcaaatccgtggtaaataaatacttgtcaaaatcaacttgggttaaaaagccctcactgaccatctttgccaaaaattgttgcaataaatcgtaataaccggccacgttatagaagatacacggcccatcttgttgcccaattcgcgcccacgaaatcacttcgctcatttcttccaacgttcccggaccgcccggcaatgcgataaaaacctcagcgagttcaatcatgcgatgcttgcgcgtcgccatatcgtctacaattagcgtttcagttaaccccgtatgcatcaattcacgttggttcaaaaaggccggcataatgccggtcacttggcccccttgttgtaagacggcatcggcaatcgtgcccattaacccaacctgaccaccgccatagattagacgatcacctcgttggactaaccacgttcctaacgttttggctgcttcagcatagatcggtttgttccccatgctagcaccacaataaactgccacattgaccattggttcatccccctacaacattctagcaatcgtactaattggtaaaccgacaacattgtaaaaatcgccgttaattttttcaactaataagttaccggctccttgaatcccgtatgcgccagccttgtcctgatactcgttctgatctaaataggtttcaatcatctgatcgcttaacgaccaaaaagtcacatcggtcttcaccactgtttgttgaacctgaccatccttcgttaaccaaacacccgtataggcttggtgcgtctgtccacttagttgtcgtaaaacggcggctgcatcttggcgatcttgtggtttaccgtaaatcgtctcttgaaaactaaccaccgtatcggcacttaaaaccgtggccgttggattttgagccgcgacttgttcccctttacgccgtgctagtgtttgcacgtagtcggcgggtttagtaaacggtgtttcgcgttcattaatttgagccggaatcgtgataaattctggcacaatttgtttcaataattcttttcgtcttggtgattgcgatgctaaaataaacattattcaccctcccaactatgatgcggttcttgaatgcgtttaaacattttttctaaatctttttgcgtgtagtgaattaaaaccgggcgaccgtgtggacagttaaacggattttcggcttgcgctaagtcaaccaacaacgctttggcttgcgcgtcatctaaatggtggtgcgctttaatcgcttgtttacagctcatcatgatcgctgttttttcacggaactgagcgatcttaatctgaccgtcttttaaaagatcatcaatcatattgcgaatcgtgacttcttcttgacccgcttcaatccaagtcggatgactatggactacaaaactattctgaccgaacgattctaattgaataccgacctgcgctaataaatcagctttagcctgaatcttaaccgcgtcactattcgggtattccaacactaagggcaccaataaattctggacgtccgagctgacttgcccaatcgcttcacgataatattcatatttaatccgttcttgcgctgcgtgttggtcaacaatgtaaaaaccgtcttcgccttccgctaacaggaacgtatcatgcagttgcccaatgaatcgtagtgtcggaaaacggggtaaatcagccgttgtggtcttagttgtggggtcatctccaaacggagtcccaaccgcttcagtcgtatacttctgatcccaatcagctaattgcgccggatgttcaaaaatcggcagctgactattcgctagtttatcggtgaccggtaaagcgacggcagtttccgcaatttcagcggcagtcgcggtctctgtctcaactgctttttcagtcggatcaaccggtagccgcgttttagaggcttggttgagatttaattgtagttgatcgatatccaccgttgacgtttgtttcagattcttgaccgcatctggaatcaaattttcggtactcaatcgtttacgaatcgcccgttcaatcaaggtcatcaaagccggttctttacttaaccggacttcctgcttagtcggatgaacgttgacgtcgattaacaacggatccatcttaatatttaagaccgcgacgggataccggcccaccattaatttcgaaccataccctttaataatcgctttatttaattggtaattcttaatgtagcgcccgttaatcaggattgataaataattgcgggtggcacgcgttaattcaggtaatgagacataacccgtcaatttaaaatctaaatcatgatcactgatgggcaacaattttttagccattgaaacgccgtaaatgccagcaatcgtttgttgtaaatcgttattgccggccgtttttaataatagatggtcatcgttggttaacgtaaacgcaatttgcggatgactcatcgccaagcgattgacaatatcaatcacgttggctaattcagtttggaaagtcttaatgtatttcaaccgtgctggtgtattaaaaaataaatcgcgcacagtcaccgctgtccccggtcgaatcgggttcgtcttttgactctccaagacaccacctttgaaatgggcaaacgtccctagcgaatcagccgtggccgtttcaatcgttaaatccgaaacggaagcaatactggctaacgcttcaccccgaaaaccgagtgattgaattttaaacaaatcttgacgcgttgcaatcttactagtcgcatgccgtttaaacgccgtcgggacgtcttccggttcaatcccgtcaccattatcgatgacttgaattaactgcaagccagcttgttcaatcaccacgtcaatctgagtactattggcgtcaatcgcattttcggccaattctttgacgaccgatgctggccgttcaatcacttcaccagcggcaatttgattacttaatatttcggatagttcatgaattttggccatcaacaggtcctcctttgggggattcaatacgcacaattttgtactaatgctcagttattacccgcaactctaaacaattcgatttttaacgtgcttctaagccagttgcttgcgtctagctacaaatcgaaaattatggctaagaccggccataattctcaattttaggctatactcagcgactacccggcttagtcagcacttcgattttttaacgtgcttcttgagtagccttttccggttaacaataaaaactcaatcatggttataaacccaaccataattaattttctaccgttaatcctcaaagcctgaccaactcaatcagcacttctatctttaacgtgcttctaagccagccgcctccgtctagctacaaatcaaaaattatggctgagtccggccataattctcgattttaggctatactcagcgactcccggcttaatcagcacttcgatcttttaacgtgcttcttgagtagccttttccggttaacaataaaaactcaatcatggttataaacccaaccataattaattttctaccgttaatcctcaaagcctgaccaactcaatcagcactcatttaatttctttttgccacttatataattggtttagggcttctagtggggtggcgctcattaggtcgaactctttgatttcggcctttagtttttcagcgactgggtctgttttgaccgtcaccgtttccggttcgaataacgccatttgttcgtcgacttcagcaattccaggcgtctctgtttcaactggcatcggttcaaccgcagtcggtgccgtaatcgtcacggttggtttttgttccagttggcccaaaattaaatccgcccgtttcaataaatcatcaggcatccccgctaatttagcaacgtgaattccgtatgatttatcggctggtccggctaacattttgtgtaagaagaccaattcaccgttttcttcaaccgccccaacgtggacattcttcaaagcggctagcgtgtctgccagcgcggtcaattcgtgataatgggtcgaaaataaagttttggcgtgcacgtgatcgtgaatgtgttcaataatcgcttgtgctaaggccatcccgtcataagtagcggtcccccgtccaatttcatcaaacagaattaaactgttcggtgtcgcactcataatcgcgcggttagcttccatcatttcgaccatgaacgtactttgacctgaaattaaatcatcggccgcaccaattcgcgtaaaaatttgatcaaaaatcggtaggttggcggatttagcgggcacaaaacaacccatctgcgccataatcaccgtcaacgctaattggcgcatataagtacttttaccagacatattggggcccgtaatcaacagaatatcagtccctaatctcatttgaacatcattcgggatgtacttctggcgacccagtactttttcaacgaccggatgtcggccttcaaccaaatcaatttcacgattgtccgttttaaaagtgggctgaacataatggtagttttcactgaccaccgcgaaactctgtaagacgtccaaggccgcgacacctttagccaatttttgcagccgttcaatttgcgttttaacttgttcgcgaacttgcgtaaacaattcgtattccaacgcagttgaccgttcttccgcttcaagaattaattgctctttggcctttaattctggcgtaataaaccgttcggcgttggctaacgtttgtttccgttcatagcgcccttctggcaacgccgctaaattagcgcgtgtgacttcgatgtaataaccaaaaacccggttaaagccgatctttaaggtatgaataccggttgcttcccgttctttggcttcgagttgggccaaccattgtttaccgttagacatcgcgtcgcgataatcatccagcgtttgattgtagccattttgaatcaagccaccatcggtaatcgaaatcggcggttccggcatgatggccgtttcaatcaattgacggacatcatcgaccggatcgagttgcgttaaggcttggtcaaaagcgtgatcgtcattaatcgtcgctaacgtcgctttaatcgttggaatctgttcgagagaagtcttcaattgaatcaaatcgcgcccgttaacactcccaaaagccacgcgtcccgctaatcgttctaaatcataaaccttggttaaactatcttgtagattagttcgttcgaaatagtggtttaaaaaattagcgacttgattttgccgattttgaatcgcttttgcatccaataagggccgttccaaccactgttttaataaccgaccacccattgcggttttggtttcatccaataaccacaataaagtgccgctcttgtgcccggtacgtaaagaagccgttaattcgagattcatctttgccgaatgatctaatttcaaatattgagagagttcatattcctgtgcccgttgtaaatggcctagatgccgtttttgcgtcgccgctaaataacccaccaattgcttgatgactgccaattcgagtggttgcgcaatgttttgcgagacaaaactaatctcagccgtatcgttagtgtcgccttgatatgaaaccaagatttgttgttggacaaatgcttggacgacttcagtcggcattgattggtttaaaacgacttccttagtttgcaaactcaacatttcgtttaataacaaatctaaactatcgattaaactgaccttaatctcaccagtcgataaatcagtgtatgcaaaaccgtattggccttgttcggcaaccacggcggttaagtagttattctgtttcgaatgccccgctttttcgtccatcatggtccccggtgtcaccagttggatgacttcgcgtttaaccatccctttagcggtcttcgggtcttccatctgttcacaaatggcgactttgtacccttgatcgactaagatatcgatgtaattctgcgcggcatggtgcgggacgccacacatcggaatcgggtcttcagcacttttattacgggccgttaacgttaattctaacaattgcgaggctttaaccgcatcttcattgaataattcgtaaaaatcgcctagacgataaaataaaaaggcatccggatattgatccttcactttttgatattgcgccatcattggcgttgattttgttttttgtggcatgtttcaaaatcccctttactcgtctaaaccatcaatttgtgattgtaaataagtcgtcatatattccaacgtcgcattggcttcgtataacgccgctcggtattcttgcacgagtggattatccgccaactgctggtttaactgatctgctacttgattatcaacccgtgcagcgttgggcttattataatggacagcttggacagcctctttttgagcggcttcaatatcggtttgcaactgcgcaatttcaggatgttgcttaaccgtctgttcaatggcttgaaaccgttgaaccgtttgattggcctgaatcagcgttgtcaaacggtctaattcagcgacaattgtgggttctagtgctaacattttttcttctgtcatgactgagctccttaaaaacgattgccaaacggatgatctggggagatttgaatcggtttgattgatttagcccggccggtttgatcatcaatttcaatcagacaaccgtttaattgacccggtccttctgtgacgagttcaaaccgttctggtcgttgcgtcataaaacggttgataatcttttcgcgtttaacacctaaaatcccgttataggggcccgtcatcccggcatcggttaagacggctgtgccttctggtaagacacgtgcatcgttggtttgaacgtgcgtgtgtgtgccgactaacgccgaaatccgtccgtctaaataccaagctaacgctaatttttcactcgtggtttcagcatggaaatcgacaaaaatacaatcggtctctttgctgacttcggccaccatttcatccaacatactgaacggatcttcgagtaattcattcatcaaagcgcggccttgcaaattaataacggcgagtttcgcttggttgactttaatcatcgtcatcccttggccgggtgtccctttaggaaagtttgctggtcggactaatttcttagcatcatcgataaaatcgaggatatcgcgtttattccaagtatggttgcccatcgtaatcgcatcggcaccagcttgtaatagattcttataatccttttgggtcatccctttcccatcggcaatattttcaccattgataatcgtgacttgtggtttatattcttgtttcaataatggcaaataatcgttaatcatcttttggcccattgcaccaactgtgtccccaataaataaaattcgcatgttgcgcccctttaatctgtcttcaaacttcgttagcttctattgtagcaatttttaacgcgaataaaaagttttgtcgccattcaaaaaataagctgtcaatcatgctgttcttaaattaaataaccatttttatttgacgcgcaccagaactcatcaatttccgttcaaatcaaaaactccgattatccttagttcaggataatcggagtttccaacttgatactcaattgataaccgagttctgtcacagctttttaatgttttaagtgataactatacgtcgcaataatgatgttttcacgactcgcaaatgcgtttctcaaacgtaaacttgattggttatgcaaaatgttttgccaaggtttcttcggcacaaattgagggaccaacaccgtcgttgtgaaattacgtttttgggcatttttgctgacgatatcaacgaaccgaacaattggtttttgaattgaacggtaagatgaatggacatcaacaaagcggacgttcgggaaatcggctttaaattcagtttgtgtttcccgttccttagtcggattttcatccgtcgaaacgtgcattgcaatcacgtaatccccaatcgattgcgcataatccaacgcaccccgtgtcacttgtgtcacgttgctgactaacacaatcacagttgacccatcgtaatcatgtagttcagcttctttggcactgacccgtaattggatggccacttttttatagtgatcgtgaatcttatagaaaatcagtaacatgattggcatgatgatgaagaatggccagatatcaggcaaccggtaaacgaagagaatgatcaaaatgacaaacgaaattaacgcaccaacaaagttcgcaattgacttgctgaaccagtgttttggtcgttctgaccaccatttacgcaacatgcccacttgtgacaaggtaaatggtagaaagaccccgaccgcgtacagaggaatcaagcgtgaggtatcaccgttaaagatgaaaatcaacgccattgatccgatggccaacgtgataatcccgttagaataacctagccgatcaccacgatccatgtacatatgtggcatgtatttatctttcgccaaattataagctaacactgggaaggccgaaaaaccggtattggccgcaacggctaagataaaggccgtcgcaaattgaacgatgtaatagaagaaccctttaccgaaagtctgtaaggccacttgtgaaagcaccgttactctcgccattgggacaatcccgtaccaatagtttaagaatgtaatcccggcaaagaagaaccctaaaatcgcagccatgatgcccaatgttgcagcagcgttgactgctcgtggttttttaaagaatggtacggcgttactaatcgcttcaaccccggttaatgacgacgaacctgatgaaaaggctctaaagattaacgccatcgaaatcccgggaacaaccgccccaacggttgacgcggcgtggaatggaatcgcacctgaaaagattttataacagccgacaatcaccataatcgtcatcatcacaacgaataagtagaccggcaccatcaagaaggacgctgattcgcgcatcccccgtaagttcatcgccattaaaatgatgacaataatcaatgaaatgccaacttgatggccgtataacggtggaattgccgacgtaatcgcttcggcccccgctgaaatactaaccgctacagtcaacatataatcgactaacaatgatcccccagcgattaacccggcatttttacctaagttttcactagaaacgacgtacgcaccaccaccacctggataggcgtggatgacttgtcgataagataaggttaacgctaaaagtaaaattaaaacaaatgcagcaatcggaatagaataccaaattgcggccgccgataaggttgtcagaacgaccacaatctgttcaggtccataggcgactgatgataaagcgtctgaagataataatgctaaggccttgaaacgccctaatttttgatcaccttcatcagaagtttttaacggtttcccgataaaaaaacgttttaactgttgcataactagctagctcctctaagtcgtatttcttaacataaaaagccctcgtgtgataatcgcatgttaccatttcacacggtgacttttgaaaataaagtgttctaaaaaataataatagccgtttattcaaacacaaggtattctactacaattattttaaaattactaccaaaatttgtaatccaatcataacgtcttagtggattctcatcttatagtcggcgtgcaaaatctggtacataatccgtcaacttggtcacacggacatgatctcctggttggggcgcttgaataaagtaaccattgccaatataaatcgcgacatggtgggcggtcccgacgccaccccagaagagtaaatcggtgggctgtaaatccttcaaagcaacgtccttccccaatttactctgttcttgtgaggtccgtggtaattgttggccatttagtgcaaagacgtattgcactaagccggagcaatcgaacccttttggcgatgtcccaccccagacgtaagggaccccgatatatttcagggtcgttttaacaatcgcgttattgctgatggccggattaccggtggctgcttttaaaccgaccttattggccgcctccgccgctgctgcttgagccgctaactctgtcttatactttgcttgtaattgcttgagttgcgtattagccgttgttttctgctgattgagcgatgttagcgtttcggtattggttttagctaactcattcagtttggtttgctgactttctaaggtttgtttctgttttgtgacctgcttggcgaggtcttctgtttccgtcgcatttgagactttagcatccattaaccggtccataatcgcgcctttttggaataaatccccaaggttgcgactgtctaataaactatcaagcatcgccaaattaaaactactatccttagcttgcagttgttgtaagttgccttcgattaacttaacttgggccgtataagcggcattcgtttgatctaacgtcccttgcgttgctgttatttgcgtttgtttggctgtcatttggtttttcaattgctcagctgtcacggttaaattactaatattattattgagtttagataaatcggtctgcgccgttttgattgcggcttgtgtctcaactggtgttgcattgactgtttccgaatgactgattaagacgaccccagccattaacaccattgtgatgacactcattatttttttaatcattctagtatcactccccacgctcattatactcaatatccaaataattaacagggtgtacgacttattgtccctcacttatgatatacgttaaaatgattcatatttttcgtttgattataaaaataaggtggtgactaagttatactcggaagctacccgtgagttctagcactctgattctaaaacgtgcttctcgaatagccttttccggttaactagaaaacaggcatcatgggttaaaaacacccacaatgcctgttttcagattaatcctcaaagcctaacccattcgagtcagcactctctccaaaacgtgcttttggttgcaacaacttccgcttaatctaaaatagcgtatcatgacttaaaatcgtcataatacgctatttttattaatgctcagttgctaaccgcaactaaaagcactctgattaaaacgtgcaagtgctcacagcttcttgtgcttagctacgtttcgcaaacaaagtccacaaatcggactttattcacggaactaggctaatgctcggaagctacccgtgagccctagcactctctccaaaacgtgcctcctcagccaacttcttccgtctagctacaaataaaagcttatgaccaaagttcaggccataagcttttattttaggctatactcagaagctaaacggctgagtcagcactctacatcattccgcccattgctgatgggtccatgccaccggctggtgctgccgggtggtcttctggtttgtcagcgacgactgcttcagttgttaacatcaatgcggcaacgctggctgcattttgtaacgctgaacgtgtgaccttagttgggtctaaaatcccagcgtcaatcatattttcccagttaccgttggcggcgttatagccgatttcagtgtcttgagatttcactttttcaacaatcactgaaccttcaaggcccgcattggttgcaatttgacgaacaggttcttcaagtgaacgtaatacgatattaatcccggtttgaacgtcgccttcttcttctaaggctgcgacactgctcatcacgtcgattaaagcagtcccaccaccggcaacgtaaccttcttcaacggctgcgcgcgttgcgtttaaggcgtcttcaatccggtatttacgttctttcaattcggtttcagtagcagccccaactttgatgactgcgacgccgccagctaatttagctaaacgttcttgtaatttttcacgatcaaaatcagaagtggtttcagccacttgtttcttgatgttttcaactcgttcagcgatggctgctttactaccagcaccttcaacgatagttgtattatcttttgtaattgtcactttaccagctgtccctaattgatcgatggttgtttcttttaattcgaggcctaaatcactggtaataacagtcgcacccgttaaagttgcgatatcttcaagttgttccttacgacgatcgccaaaaccaggcgctttaaccgcaacaacgttgaacgtcccacgaatcttgtttaaaacaagggttggtaaagcttcaccatcaacatcgtcagcgatgattaatagcgctttgccttcttgaacgattgattgtaataatggtaaaacatcttgaatgttagaaatcttcttatccgtaattaagatgtatgggttgtcgagatcggcttccatcttgtcgttatcagtcaccatgtattgtgataaataaccacgatcgaattgcatcccttcaacgacgcttaattccgtatcaatcccttttgattcttcaaccgtaatcacaccgtcgttaccgactttttccatcgcatcggcaattaactgtcccgtttctttattatcagatgagacggcagcgacttgcgcaatagcctctttactttcaactggatgtgaaatttcgtgtaattttttaaccgctgttttagtggctagttcaatcccacgacgaatgccaacaggattagcaccggcagtcacgttcttcatgccttcgcgaataatcgcttgggctaaaacagtggccgtggttgtgccgtcaccagcgatatcgttagttttagaagcaacttctgcaactaacttagcgcccatgttttcgaaatgatcttccaattcgatggctttagcgattgtgacaccatcattggtaatttcaggtgaaccgtacgctttttccaaaacgacgttgcggcctttaggtcctaaagttgttttaacggtatttgctaattgatcaacacccgctaacatttttgagcgagcatcttctgaaaatttaagttcttttgccataattctttcacctcattaaatatttttgtatcgatttatatttgatttattcaacaattgccatgatatctttagcgtgcaagactaaatatgaagcgccggcatagtccacttctgaaccggcatatttgtcataaaggacttcatcgtccactttaacggataatggaattcgttggccgtcattagtgagcgttccttcacctactgcaacaactttaccagtttgtggtttttgcttcgcattgctagctaacacaatgccaccaacggtttgttcttcttcgtctttaactgcgataatcacgcgatcttctaatggttttaacacttaaaatccctccatcaatttttcttttttagcactcgattaacacaagtgctaattacattttttatcatagcattttctcagaacattgcaagtattttgctggcactttgcatttcgagtgctaatacgctaaactattgtcacatcaacctttgaggagatactcaatgactttatacaaacaaaattttagaattattttaacttatttaatcgtgctcgtcttaccgagtgcttgtgcgcaacttttcaagctaacaccgcaaattttcttgttgacgactatctttgatttactaggggcgcttggcttattagtcttcaatcgacgccggacggctaattcattggaatatcatcccgccccccttaaaacgattatcatgtggggcatcagcggcattttattaaccttactcgttcaagtcttggccgggattgtggaccatctgattttcaagaattcggctaactcgttaaacacgattacgttaatgactgctatgcgccaacaaccttggctcattttagccgtcacgattgccgcacctgtgatggaagaaattgtttttcgcggggccatcttcggcggtttgtccggtacgattaacccgctttgggccgctttaatttctagcttgctatttagtttactgcaccaagacggtcatctgattatttacgcggccattggtttgtttctgtgctggctctaccgtaagaccggctcgctatacacgacgattatcagtcacgctggtatgaatctgctcgtaacgttaacgtatctattgcgttaaaaaaatagcgtctaagcaagctacctaatgctggataacttgtttaaacgctattttaaagtcgcttattgttctgttttggtttcgtcgttataattatctaagaaataaattaacgtttgcaattctttggctaaatcgacgttttgaatccgaatacccgttggcactgaaattcgaattggggtaaagttcataatccctttgatcccagcttcaactaaatcgtccgttactttttgagcgacatcgattggcaccgttagaatcacgatttcaatttgttggttttttaattcttcaaccatttcagccattgggtaaactggtacgcccgtttgaatcgtgccgattaattcttctttaacgtcaaaagcggcgctgatccgaatattattggtttgacggaaattataatttagtaaagcgtgccctaaattaccaaccccaatcaaagcaacgtttgttaaacggtcttgattcaaagtctttttaaagaaatttaacaatgattctacatcataaccataaccacgtttacctagcgccccgaaatatgaaaaatcgcgacgaatcgttgcactatccactttaactgcttcagatagttcggtagatgaaatttttgccgtgcctgcattattcaaaaaattcaaatagcgataatataaaggtaaacgtttcgctgtggctcttggaattttattttcagccattttggaacctccgtttatttttgcttgtgaaatttagcgttgtacgctattgaaatcatactgaattttcttgtgaaaagcaattaatttacaatttcaccagtcaaacctttaaatctgttatgataagtaaagttgccccactaatttcttaaaatgaagccctttaaaccaccatacgaaaggaatttttatcgtgatattactacaagttcaacaagttgctcgccatttcggtggcgattatttattcaaaaatgctcaattagaagtccaagaccacgcccgagtcgctttagtcggcccgaacggtgctggtaaatcaacactccttaaaatgattgccggtatcaccacgcccgatgacggtcaaattattctgggtaaaaatgtgcaagtcggctacctcgcccaagacagtggtctcagttcagaacggacaatttacgctgaaatgttaaccatctttgaaccgttacgtcaaatggaacaacaaatgcacacgttggaagcggccattgctgattcgagtactgaccatacaaatgctgactacgctgatttgttgaaacgttacgatcaaattcaacacgatttcacagaagctaacggttatggttacgaagccgaaattcgtggtgtgctccacggtttccaatttccagaagaaacgtttgaaaaaccaatcagtacgctttctggtggcgaacgctcccgtctcgcacttgctaagttattgttagcaaaaaaagacgtcttaatcttggacgaacccaccaaccatttggatatcgaaaccttaacttggttagaaaattatctacaaacttaccccggcgccttactaacggtttcacatgaccgttacttcctcgataaaattaccaaagaagtttacgatatgagccgccatacattaacgcattacaccggcaattacagtcatttcttaaccttaaaggccgataacctaacgttagaatggaaggccttcgaaaaacaacaagccgaaattgaaaaattacaaacgttcgtcgacaaaaatattgtccgcgctagctcgaccaaacaagctcagagtcggcgtaaacaactcgaaaaaatggataaactggatcgaccgcaaaatgatgccgctaaaatccatttccattttgaaacggaacaaccgagtggtaatgaagttttaaaagtcactgaggcagcggttggctacgaacccgacaaaattatggttgaaccgattaatttcgaagttaaccgccaagaacgactagcgattattggccccaacgggattggtaaatcgaccctcctcaaaagtgtgctccacaaaattccgtttatcaaaggtcaagaaaaattaggcagtaacgtgtcggtcggttattacgatcaagaacagcgaaacctacacgctaacaaaactgtcttagaagaattgtgggacgatcaccggactacgcccgaaaaagaaattcgaacgttactcggaagcttcctattcagtggcgacgacgttttaaaagtcgtttcacaattaagtggtggtgaaaaagcccgcctactattgactaaattggcgatgaatcacgataacttcctgatcatggatgaaccgactaaccatttagatattgatagtaaggaagtcctcgaaacagccttacgtgactttaatggcaccgtcctgttcgtttcccatgaccgctatttcatcaaccaagtcgcgaccggcattattgaattatccgataccggcagcaaacggtatttgggcgattacgattattatctggccaaaaaagcggaggaagaagcgttcgccgccgctgatacgccaaccaccaccactcaaacaatcgtcactgcacaagacggttacaaggctagcaaagaaacccaacgcgcccaacgcaaattggcccgtttagtggaacagcttgaaaatcaaatgggcgagttagaacaacaagccaccgacatccaagaagaaatggcccaaagtgagacgattactaaaccattggtccttcaagaattacaacaaaaactcgaaacggttcaagcccaattagcccaaactgaaactgaatgggaagaacaagcccttgcacttgaaggttttcctgactaaaaaagcgcgaacacaaaaatggttgaacccagacattgggttcaaccattttaatttatgattaactgtgtgaggtcacagctaattaagcttatttgattaaagctaatccttgtttcaagacagttgcgccgtccatcataccgtaagatttcatatcaatgacttcaacgccgatgcctttaggagccaatttttctttgaattgaccttccatgaaacgaacttgaggtcctaataagacgcagctaatgtttttagattctaattgattatctgcatctgatgcaccagttgcaaagatttcaacttcaataccttgttcttcagctgctttttgcatttttgtcactaataaactcgttgacatccctgctgcacaacataacatgattgttttttctgccataataaaattaccccttaagttttagtttcgaattgatagaaagaacgcaacttcttaaaagcgttttcaatttctatatttttagtataagcgctttctttatttttgtcaaataattgttatttaaaatataaacagccctaatcctaagcagtacaacgattattcaataaaatcatccgttattttattagctgaaaataaaaaagattgctcttcagcaatctttttatatttccgcttggtatggaaaatctaatcccggaatcgcatttaaagttaaatcggccaacgtgcctttgcgcaatgcaatgtgtgcagccgccccaatcattgcgccgttatccccgcacaatcgtaatggtggcaaaattaattgcaattcgggcatctgggcttgaatcgcactggttaatgcttcacgtaacccttgattggccgcaacaccaccggcaacgaccaattgtttgacttgcaatttttgagccgccttcaatgttttagtcaccaagacttcaatcacactagcttgaaaactagctgccaaatccgccttgtccaattgttcgccaatttgatccgcgtgatgcaccgtattgataaaggcactctttaacccgctgaaactaaaatcgagattgggttctttaagcatggcgcgtggaaaattaaacgtatcttggcccaaatgtgcgagacggtcaatttctttgccggcaggataaggtacgcctaacacccgaccaattttatcgtacgcttcacccgccgcatcatcacgtgtatccccaatgatttcgaattcaccggctgcgggcatataaaccaactctgtatggccgcccgagacgagtaacgcaagtaatgggtatgctagtggtgcgacaaagcgcgccgcataaatatgccccgccatatggttgactggcactaatggtaagtgatgggcgtaagcaatcgccttagcggccgtcacgccgattaataacgcacccaccagaccaggtccataagtgacggcgaccgcggttaaatcactatacgtcacgtttgcttcagccaacgcttgttccgtacaacgtgtaatttgttccacatgatggcgactagccacttctggcaccacgcccccaaaacgttgatgactcttaatttgcgttgcgataatattacttaaaatatggtggccattttcaatgactgccacactggtttcatcacagctagattcaaatgctaagatcaattctcttttttccgccattttaaattacccctgctgacttaataaacgacacatactgaatgcatcctctttttcttgaatataataattacgccgcgtccgaacgaccttaaaacccatccgttgatagaccgattgggcgccttcattactcgcccgcacttctaacgtaattttttgactcggatagtcacgcgcaagttgcaccatcttatggactaagaagtggccaatcccacgccgttgataactcggccgaaccgcaatgttggtgatgtgcgcttcattcgctgaaaaccaagcaccaataaacgcgaccacttcagagccttgacacaatactaaataaattgacgttcgccgtttattcaattcactggcaaacgcccaccggtcccacggggttttccccgcgtagacggcgcgttcaatctcaattaatgctggaatatcactttgttccgcccgcgctaaataaaaggattgcgcatcgatttcaacttgctccgtggtatacggcaattcccgtttcaaccaaactcgtggttgtaaataaactttaaacttgttccacataggcttgagatccttgatcgacatgggtcttagcccaattaacttctgcttcagtttttcgtaaatagtggggtccaaatccgtgaatatcactgacgggtgtcgcggttaaccctaactggcctaaaacagcggcgtggggtaaattctgattcgcaccaacaaaatgcgcctgactccccaaagtcgtttgaatgattgctttaaaaaccgcaacatcattaccgacgaagtagaccggttcttttaataatgccaattgtgccaacaaatcgcttaatgccacgtgttgatcagtaaccacattttggagtctgccctgttgccattgataaacacccgcaaagacgttctcgcggcgcgcatcaaacaacggcacgattaaatcggtccgatccgtgacattgcctgccaataacgccaagctggacaatccgacgagttctttttgtaacgtccacgctaacgatttagcggttgtgaccgcaatccgcaagccggtgtaagaaccgggaccttgcgccacaacaaaccgatcaatagtttcaatcggcgtcttggtttgttttaataattgatcaatcattggtaacaacgtttgactgtgggtttggcgaatattgaccgtcatttcgcctaatatttgttggtcttctaacagtgccacactcactgcttggttagcggtatccattgccaataacttcatcgtgtcatccttcttctgcttataatccttgttattctagcataaatcgcggattaaatcgactcgctcgttgcgaacaaccgacgattttactgttaaagtgtaactagcccaataaaaaagactcatggctgagtccttatataataaaatcaccacaacaccattcacaaggaaaacctgactatgtgcccaaatgttttaatttaaatgactgcctcgcaaaatcctaggctgaaaaacatcgaatagagtttttttacggttggcaggtacacttcacttgaaaatttcgtcgtccaagcggttagtgtccagcgaattagttcctaaaaatttatgggttggcaatttatcaacaactgacaaggcctcaacgtcgatatgtcatgcgatttcagcgatcagtacaccaccagcgcccacttaaacggacaaaacattgcggcaatgattcccctggggcaacaaataagggttaaataaaaaaatggcaaatataacctaaatagattatatctgccgttttttattgtgtgcttatggattaatattcttctgtatctgaacctgtaaccgtcattttttgagtcactaaagcaggaactgtattgctcccaccaatctgtgtatcgtaggtttgtctcttcaagaaaacaccttcgatatcaacataatcgtcttccactgcatcagttttatcttcataaagtaccatgaataaatgactaggatcatcatctgtgtaaactaataaagttgttccatcttcatcttcatcagcctgtaggaccttagcctttgaaatatggtatgacttacccaaccagtcatcggatttaacaaattcgccataagtatgtgtttgggcgttgttttcaccttcagttgcatcatacgttgtggcagtattgtcagaagattcactagtagcactggattcgtctactagagtatcatctgattcactggaacttgattttatatcatttaaataatcaactatttcttgattatacgtaagtttagttggtgtgattttattttgcatagtcgttagaactcttttagggattttattgatgtaatcccatttcttattataattatcaattgcaaaaatataggctttagccgtagtcccaacgctataagtttcttcatagtgtacgtttataccagaaataattactttaaatttaccttgatgaaccgttgtccatccgtcactcgctgaatcagtagcatcttctccaaaattaatttcttcagtatcactagatgtaaccatgattttagcgttattgggtgctgatgttgtaccttcaactacccaatcaccatattcattattcgatatctttgttactttagttgcatagattttttcttgtttgacagtactttcctttttagtattaccgcatgcccccaaaactgtggccaacaataaaaccgttatcgaatatattactttacgcattgtaaatctcctccaaattatcacgtttattaagacattctaatcccaattaaaatgtcccctattgaagaataagtctttgttataaagtttacaagtcaaatttactattgaagtgcaactaaccaaattaaaatactgatagccttagtcctcgtataaggtaatcaacacaaccccattcacaaggagatcccgtataaacagctaccttaaataatcgcaccgcaaattcttaggttggaaaacaccaattgaatttttttacagttggcggttgtacttggcttaacaattcgccccacaaaaaaagtcccaccaaagctaattggtgagactcattggttatcttaaactatttttaaaactacaaccgattcttaagacgcacgattggatcaaaatgcatgacagcatacaacacaattggatgcacgattaacgtgacaatttcaccgattgcccgtgcgcctaagtggtatgtgattggtgtgtgacttaagattgccacccaccaggaattgagaaatagattaacaaataacaccacggtcaacaccgctaagatgacccgtaaccacgtaatcttttgtcgatagaaataacaaccgtagataaaagcgcctaaaaacgctgataacgtgaatcccggaaaataaccacccggcacaccaatcattaaactattgattaaatcgccaatcacagcggctatgccagcccataatggtccaaaccaccagcccattaaggccgtcacgataaagccaaaactaattctgaaaatcactagcggaattgcaaaccgggctaataccagctgtaaagccactaaaattgctagtaaaacaacgcgtctggtgtctagcttgccacctaaaatctgacttttgaacataaaaaaagcatctcccttttggagttgccacaaataatactgcggcgaatgcgggactaaaaccgcaagcattgctgcttttcgtctgatgttcacattccgttccatcagcacttaacgctttagtccctactccgaatcttttagaacgcattaaatgtaccatgttttttaatttgacacaattgaagtggcttaattctcatcatctcgtcattcttttacgttcaatatttgctatactgaaggggcaagcaacttcgaatcagaaaggtgactgattttaatgaaaaaaattcttgtattacacactggtggcacaatcgcgatgtctgctgatcaagatggcgcggttgccccaactggccaaaatccaatggccggtttcgaaaaattatttgataaccaactcactattatcagcgaagaattcgcaaacctcccctcaccacacattacgccaactgtgatgttgtccctccaaaaacgaatccaacaagccgaaactgaaggaatcgatggcatcgtggtcactcatggtaccgacacactagaagaaacggcctatttcttagacttaaccttaccgaattcaattccggtcgtggttaccggtgcaatgcgttcttccaatgaaatcggttctgacggcttacataatctgattagtgccgtttggacggccgcttccgatgatgcccgcgataaaggggtgctggttgtgatgaacgatgaaatccacacggctcgttacgtgaccaaaacacatacaacaaacgtcgccacttttagaacacccacttttggaccattaggatttgtcagcaaacacgctgccaacttcttccaagaactcattcgttctgaaatctgtgatattgatcatttagttgaacccgttttcttattgaaagcttacgctggcatggacgctaccttattcgacggacttaaccaaccaacaacgaaaggcatcgtgattgaagcgctaggggccggtaatttaccacccgctaccttacccgcggtccaacgcttgttagatcaaaatatcccagttgttttagtctctcgctgttttaacggcgtggctgaagatgtttatgattatgaaggcggtgggattcaacttaaaaagatgggcgttactttctgccaaggtttaaacggtccgaaagcccggctcaaattacaagttggcctcagcgccggtaaaacgggctctgatttaacgaattttgtcagtaacgctgtctcatagaacacaaaaaaacttatcccgaattttcaggataagtttttttgtgttttaacgtggttgccacgtaatcatcgcttcagcagcgcttaaatcgtcaacggccactttatgccgcgtcgtaatcgccgcttcttcggtcacctgttggaccaaactttgcgtcatttggccgtattgaatctcatgcccgtaacgaatatcaacgctcgccactcggtgatccatcaagaaatcgtaatcaagcgcatctaacatccattcgaaataatggacattattgacgtgttgattgccatcgatatcaaaatagcggacccggtaggctttcgacgttgctaaagcgtgatcgactttttgaatccgggggaatcgtttactgcccttcatttcggtcgattcaaacggtgccataatttcaggtaccaccgccaccattttacgggtttcataggacatcatcacaaaaatactttgcacggcgacacattgattgcccgcttcatcgtaaagccagaaattacgataacagaaatatttattgtaactttccgcttccgtcacgattttaaccgtttcatcaacccgcggcatccgggtaatatcgagatggtattgagtcacgacccagcccagattcaagctgtgcatcgttgcttcaccgacgtttaagttaattaattgatgttccgacgccaatattaaaatattaacaagtgacgctaatgttaattcgcctttaatatccgtttcaaaatacggaattttatatgtttctgaatattgcttgcctgacattcgaaccctctattctgttaattcgtgataatcattatagaccacttgtttctttaaattattggctttggcaaccgtcttgatcgccatattgggactcgccccctgttgaatctgcgcttctacttgttcggctaacgataacgtcaccgtttcttgaacggccgtcatcgcttgtgggtctggattaccggcaacgataatcacaaattcaccccgtacttcagttgtggttgcccaatcgaggacttcttgtaatgtcccgcgaataaattcttcaaacttcttggtgatttcacgacacagtgtgacttgccgctcgggttcaaaatcaacaattaacgcttggagcgtcttcttcaaccggtgtggtgcttcataaaaaatcgtggtttcgggttttagcgctaattgcgtgacggtttccgttaactcttttcccttacgcggcaagaaaccaaagaacgtaaacggctgtgggagcacgcctgaagcgattaaaccggttaacccggcgttggcgcctggtagtggcacaaccgcgatattggcctcaatacaggccttaacgagctcatggcccggatcactaatagatggcattcccgcatcactgacttgggcaatatcatcgccattttccaatttaacaagcaactcatcaatccgttgttgcgtattgtgttcatggaaactaatttgtttcgtttcaatttcaaaatgattcaataatttttgcgtattgcgcgtatcttcagccgcaatcaattggacagctttcaacgtttcaaccgcccgatacgtcatatcccctaaattaccaatcggggttggcactaagtataatttaccggttgtggttgttttaaaactcgattgtgtttgcattttgttatcccttcaacgttctaatagaaaaacaggccaaaaaacgtgctgtcttttgccctgtcactattaatcactcgttcgttcaccataaatcacatcgttacaaaaagcgcatggttcgttgttctcgcgtcgtgacccgtaaaaatagggacagatgtgaaaaccttcttcatacaaattctgtagattttgcttcgatttagacaacccgtgcgtactttccttagcagcggccgtcgtcggttgcaattcttgtaaatgttcgcgcaagtgtttattctcaatctctaattcaacattctcttcaagaacttgagagagcacttccttcatttccgtaatgccatcaaacgttaacttggcctgttgttcaatcgtcaataagcgttcatataagtcggttttactcaacgtcgataccctcccattaatggctactaagctaatttttgtacttcagtcgcggcgtaaaccgttgcgacctgatgactatccaacctaatcttaagcatctggctcaataaattcaagccaacgaccttaccaataccgtccgcggtttggacccgcgcgccaatatcaggtagggcctttttatacgccacataagtctcatcttcatattgtagacaacacattaaccgaccgcacaatccggaaatcttgaccggatttaacgataagctttgatttttagccatcttaatcgaaactggaataaaatcacctaaaaaagtgtgacaacataattggcgtccacacggtccaataccacctaatatcttggcttcatcccggacaccaacttggcgtagttcaattctagttttaaattggcgcgccagttcgcggaccaattctcgaaaatcaacccgtttggccgccgtgaaattaaaaatcagtttatgccgatctaacgtatagaaggttgaaattaatttcatctctaattgcgcatcagcaattgcttttttcgcaaatcgtaacgccggttcagccagtgattgattggcctgttgccgttctaaatcagttttggtcactgaacgaataatggttggttggttattattattttccgtttcagtcaattcctgtttaatcgtcgcaatttcttgatgttccgcagtttgaacaaccacctgggccccaacaacataacttgccgccgcaacgacaatccccatttgattgttcgttataaaactgacttgataacttttcattcctaatcaatcccccattatccgattagctttaacgttagactttctaaaacattttgacaactaatattttgcgtcaacgcgcgttgtgccgttagaaccgcctgaacttggctcactagctgagtcaccgtcatattctgactaattgactgtagttgtggccgtgacgattcgaagcacaattcgtccgttaacccgtagcgtatattcaacaaatcttggaaccataagccgattaaggttaacccgcgcgtttgttgttgccgatcggctaacaacggtagtagttgtgtctggactaaaacaaaactctctaaatcttgttgcgctactttttgcgcccaattggttaatttactcgtggtttgtgttaaccaatcatccgttaacatttcttgtgcttcggctaaatcactcgttagatgcgctaacaattgcgcggtagctggtaaaatccccgcggcctcgaattgctttttgaccatcgccagcggtaacgccggtaaatcaatcacttgtaatcgcgataaaatagttggtaaaattaaatttttattttgtgtacataataaggcgtagacgttgggtgccggctcttctaagaacttcaataagctattagcggcactggcggtcaaggtttcagccgcttcaatgacaaaaatccgttgactagattccatcccgcttttagccacttcgcttttaagatagcgaatatcagcaactttaatactttgaccttccggttgaatcacaaccacatccgggtgattaccggtgatgatccgttgacattcagcacattggcgacaaggttgccccgcttcggtcagcgtccgacaaaagagtcgtaacgctagccattgtgctaattgtactttaccaacaccctctgcacccgccaataaatagccgtgtgccaactgaccgtgcgcaatcacttgggtcaattgactgactaatttgggttgcatttgattaattgttaactcggtcatcgcttagaaacggtggaactgttcaatcggcatcacaaagacggttgcgccgcccacttgaacttcgattggataagacattgagctatccatcgtcgcgtccatattgaccggtggtgtcatgaattgttcccgtgcttggcacgtttcttcaataatttttaaagcttctggcacccgttcatcttcaatcccaacaataaaagtggtattgccagatttcaagaaaccacccgttgttgataacttagtggcctgaatattggcatcaattaattcactacttaatagattgctatctttatcttgcacaattgcgagtaataatttcatcataatacctcctattattcttcaaaaaggctcggataatgttgttttaaaaccgccaagcattgcgccacaaccgcttcaaatgaagccgttgcatcaatggtctgaatccgtttgggttcagcctgcgcaagttttaaataagcttggcggactttctgatggaaggctaatttttcttgatctaatcggtcatattgagtttgccggtgttgcttaatacgggcaatcccgacttctgaaggcacatcgagatacaacgttaaatctggtgttagcccgtcggttgcaaataagttcatttgtgcgaccgctgtttcaccaatcgaacgacccgcgccttggtaggcgatcgaactatccacaaaccgatcacaaatcacaatttggtctgccgctagtgccggttgaatcttttcaacgatgtgttgccgacgagccgctgcgtataacaaagcctccgtccggtcatccatcgccgtattggccacgtctaaaatcacttgacgaatcttttctgaaattggattgccgcccggttcacgcgtgacaacaatttctttcgaactcatttcacgtaaaatcggtacaacggcttctaacacactggttttgccagccccatcaggaccttcaaacgtaataaattgacctgccacaaaacaaccttcttcatcaatagtcttatctatattttacttgattgtgcccacaaggtaaaggcaagtcatcaattgaatattattacggcacaaaaaagagccataacatcggtctccgtatcctgatattaaccaaataggcttctttgacgtctgccataacgcatcaattaccgttcaaatcaaaaaatccctcagttatcttaaactcaagataactgagggattttctattaatgctcaaagcctgaccgacttgaatcaacactcaggtcataacgtgccaacgcccactgattcctgtgcttagcgacgtttcataaacaagtccatagaccggacttattcacgaaactaggctaatgctcagaagctaccgtgagtttcagacacttcgatcttaacgtgcttttgagttgcaacaacttccgcttaacctaaaatcgccaattatcttaggtttgatttcattaagaaaaaataaatttttttattaaaatcaaaggtcattttcatgataatgctgatacagcaaggtttttatctttgaacttacttatctgttttgtaaatgagctgtaaagtgagttgaaatatatcttttaatgctataaactattattatcgctttaagtcataattattaccaattgtgtcaaattttgataaggattatatattgaggcttatcgaataagtgcgggaataaagattcgaaatcggtaatccgtttagagattattgggctcagaattttgtaggaggaagaatatggatgtagtagacaagtccgatttaatcggcagcacgtggtcagattttatggaatttgcggggttataccgctggttaattaataacttaagtgaatgcatgagtaaggaaagccagaaatatgggttatcttttgatcaatttttggtcatgcacgaaattcaaaatgctaataatgaaacaacaaatagtgctttagctgaaaagatgcaagtcagtcgttctgcaatctcacgtcaatgccgttcattacggaagatggcgttcattgctgaacaatctgatgaaaatgatcaacgaattcgtcgtgttcatttaacggataacgggatgcaagtttatcgtcatttattattctattatctcgatctttataacgacttaaaagaagaaattggtgaagataaggttgaagcaaccattggtcaaagtaaagaaatctttgaacgtatggtgaccatcaacagcaaccgacccgaagctaaataaagtgccataaaaaaatccgattaatcctgagtttgggactaatcggatttttaattggtatcttgattgataaagtcatgtgattttttgtaacgcgaatcagtatcggtcgatggctatctttgatagaatagggatagtggtttgacaacaaggaggaacaaaatgagttctcaaaaaaaattattattaattgatggtaatagtgtagcctttcgcgctttttttgcaatgcatcaagcgttagatcattttaccaaccaagacgggttacatactaatgcgatttatgcgtttaaaaatatgcttgatattattttgaaaaaaattgaaccgagtcacgtgttagtcgcgttcgatgcgggtaagacgacctttagaacggctgaatttagtgattataaagcgggccgctctaaaacgccgcccgaattatcagaacagtttccgtatattcgagaattgttgagtgcgtatgggattcaatcgtatgatttagataattttgaagcggatgatattattggcactttggcgaaagaagccgaggcagccggctttaccgttgatattgtcactggtgaccgcgatttaacccagttaacgactgataagacgaccgttaacatcacggttaaaggtgttaacgaaatcgaagcctatacgccagaacacgttcaagaaaagttgggattattgccgagtcagattatcgatttaaagggtttgatgggtgatacctctgacaattatccgggcgtcactaaagtgggcgaaaaaacggccttaaaattactggctgctcatgagagtatcgaaggggtctatgaacacgtcgatgaaatgaaagctagcaagttaaaagaacatttaattgaagatcgcgatcaagcatttatgagtaagatgttggccacgattcgtcgggatgcgccgttaaccgtcggtattgatgatctcgcttataatggtccggatttagagaccttaattgcgttctatcaagcgatgaatttcaaatcatttttgaatcagttgaacgtcacttcagaagaagccgtgccagttgaatcgtatgattatacggttttaaccaatgataatttaacgcttctttctgaattaacgggcaccgctacatttgggattgaaatgttaacggataattatcatacggccgagatgattggtttctacgttggtacgccaaaacactggtacgtcagcgatgatgtggctttattagcagaaccaatttttaaagattggttggaagatgctgaccaaacaaaagccgtatttgatgttaaacggaatcaagtagcggcaagtcgcttagggattgaattggcaggggttgaatttgatttattgctcgcgtcatatttattaaatacgaccaataatagtaatgacttaggaacgctcgctaatttacacgactatcaaaacgtgcaaacggatgaacaagtttacggtaaaggggctaaacgggcgctacccgaagagctaaccacgttctatcaacatttagttcagaaggcagcggcgattaatcaattacaaccccaattagtcgctcagttaaaggaacatcaacaatttgatttattcactgatatggaattaccgttagcgttggtcttagcgcggatggaaattactggtattaaagtggatgccagttgcttacaacaaatgggttctgaatttattcaaacgttaaagatattggaagaaaaagtttatgccgaagctggtgaaacttttaacatcaattcccctaaacagttaggggtcattttatttgaaaaaatgggcttaccggtcatcaagaaaaccaaaacgggttattcaactgcggttgatgtgcttgaacaactccgtaaagatgcgccgattgttcagaccattttggattatcgccagattgccaagattcaatcgacctacgttgaagggttattgaaatcgattcaccaagataataaagtgcatacgcgttatttacagactttaacgcaaacgggccgtttatcgtcagtcgatcctaacttgcaaaacattccagtccgggtggctgaaggacgtaagattcgccaagcgtttgtccctagtcaaccaggttggcaactattttcttctgattattcccaaattgaattgcgcgttttagcccatatttcgggtgatgttaacatgcaagaagcctttaaagaaaatcgggatatccatgccaatacagcgatgaagatttttggattgaccagtgcggaccaagtgacaccagatatgcggcgtcaagcgaaagcgacaaactttgggattgtttacggaattagtgactacggtttatcgcaaaatattgggattacccgtcagcaggccaaaagtttcattgaagcctatttcgaacaatatccaggtgtccaacaattcatggtcgatattgtcaaaaaggcgcgtgaagaaggctacgttgaaacgctattccatcgtcgtcggtatttaccggatattcacgctaaaagctttaatctgcggtcgtttgccgaacggactgcgatgaatacgcccattcaaggtagtgcggccgatattatcaaagtggccatgattttgatgcaaaaagaattaaccaaggctaacttacaagctaaaatgttattacaggtccatgatgaattgatttttgaagcaccagaagcagaaataccaattctacaaaaattggtgcccagtgtgatggattcagcggttagtttagccgtaccgttaaaagtggaaagtggttttggccccacttggtatgatattaagaaataaggtggaaaacaatgccagaattaccagaggttgaaaatgtgcggcgtggtttagcagaattagtcattggtaaaaccgtcaaagacatccaaattttatggtctaaaattgtcgttaatcctgatgaagtctttttagacggcttagtggatcgtcagattatcggtgttgatcggcggggcaaatatttattgattcgatttgatcacgatttaacggtcgttagccatctgcggatggaaggtaaatacgaagtggatgatcaaagtgcaccagtcaccaagcacacccacgtgatttttgagatgactgatgggacgcaattacgttatttagacacgcgtaaatttggccggatgcagttgattgaaaccggccaagaaatgacggttgctgggctgaaaaccttgggacccgaaccgacaccggcgacgtttgacgtgcaccagttttatcaagcgttacaaaaacaccataaagccatcaaaccgttattgttggatcaaaaagtggtgaccggcttaggtaatatttatgtggatgaaacattgtggttgagccagattcatccggaaacaccggctgatttattaacgcaagcggaagttcaaaaactccacgatgacatcattactgaattgcaattagcgattaatagtgggggcacaaccgtcaacacctttttgaacgcgaccggacatgctggtgcttttcaagagatgttgcatgtttatggtaaaaaaggggaaccgtgcgaacgttgtcagacgccgattgaaaaaataaaggtcgcccaacgtggcactcacttttgtccgcattgtcagattagaaaagaggcgcgttaatgacctattttttagggttaacgggtgggattgcgacgggtaaatcggcagcttccaccctttttaaaacactaggggtaccggtgattgatgcggatcaagtggcccatcaagtgatgtcggaaaatcaaacggttaaagaacaaattgcaactacttttggggattcgttagtgattgatggtcaggtcgatcgccacaaattaggacaacttgtttttggacaaccgacagccttagcgcagttgaacgcgattaccgcaccggttattcgccaagccttgattgcacagatggccgcgattaagcaagcctcagttgtggtggttgatattccgttgttgtatgaacaaggttacgccgaattattcgatggtgtggctgtggtggccgtctcacatgcgacgcaattagcacggttgatggcccgtaatcagttaacagctgaagcggctgaattacgaatcgctagtcagttgccgttggctgaaaagcgagcgcaggccgattttatattagagaatgaagggtcgttagcaacactacagacgcaaattaatagtttattaacgaaaatcactgattagttaaaaaagagggtgtgatattagttttagtatcccgatattaaacgaatattctgtattgacgcgcgccagaactcatcaatttccgttcaaatcaaaaatgctggttatctttaagttcgggataaccagcattttcaacttgatactcaattgataaccgagttctgtcacagcttatttttgacgattcaacatttagtgaatttgcgtgttcatggtataataaccaagataagatgggtttatactaaactaaaataaaagcttaatttaagaatagaaggtgtcactatgttatgtccgcattgtcatcagaatagttcacgggtcattgacagtcgaccaaccgatgaagggcgcgtgattcgtcgccgacgtgaatgtgaaaattgtcgttttcggtttacgacgtttgaacgtgttgaacaaacgccattactggtcatcaagaaaaacgggacgcgtgaagaatttaatcgcgataagttattacgcggtttgattcgggcggccgaaaaacggccagtgaccatggaacaaatgacggaaattgtcgatgatgtcgaaaataaaattcgggcactgggcgaaaatgaagtgtcgtcacaagccgttggggaatatgtgatggcactattgccagaaatcgatgagattgcctatattcggtttgccagtgtttatcgacaatttaaagatatgaacgtcttcatgaaagaattacaagacatgatgaaaaaagaaaaagcaaaagaatcaaaataaaggaaggacgtttttatggctgacgcatttgattttttaagtccaaaagacggctttttggtgacgaaagcaaactatttaactgattttgaccaaacggtggtgacgtatttgtatcaaccgttgatgggcgccgttgcctatagtctttatttgttattgtggagccaagtgaaggatgttgcgagtcaacatcaatttcaaacgcacgcaacactattgaatttattgagtgttgatttgccagcgttctatgacgggcgcagtaaattagaggcattaggcttaattcgaacttaccaaaaaaacggtgaagcgggccggcaactggtttatgaattatacgcaccaatgaaaccagatgtctttttcaaagacgatctattgagcgttgtgttgtatgaatcggttggcgagaagcggtttatcgaattgcgggaacggtttaagctccaaccggtgcgttcacaagattataaagaagtcagcaagaactttttaaccgtcttccacgttcaaaatgaccatttgctaaatacaccagatggcgttgcagaaacgaagagcctttatcagcagaaatcgccaaataaacctagtttcagcgcgcttgaattacaaacgtttgattgggagctgttgcaagatgttttagggcaacggcagatttcacccgacgaagtgttacgtaacgaacaacggttatttaatttacattatttctatggcttagacgaaataaccctcgcgaacttaatgggcacgacgatggatgccagagacaatacgttgaatatggatgcgcttgaacaaaatgttttaggtaactatacgcgccgccacgcggctcaaaataaagtggcgactgattctaaatataccttgagtgaattacaaaagcaggggcaacaggccaagtttaacgaacaagaaatgcagtggttgacggacagccaacgctatctaccggtcgattatttgaacgatttaaagcagaaaaaacacggctacgtcgctaaaaatgaaattcgggcgctaaaagatttgcaaggacgctatatttttagtaacgatgtgctcaatattttagtagcgtacattactgaacgctatgaagggttgacgcaagcgctgttggatcggattgctaatcaatgggcgcaaaaaggggttcaaacgccggttgatgccattcagcagattcgtcaattccaaacggcgcaaactgataaagcgaagacgaaacaaaataatcgttatcaaacaaaaccgacgaaacaagaaaccgtgccgaagtgggcgcaacccgattatcaggcacccaaggaaacgacaactaaggccgatcagaatcaagtcgatcaattgctcaaaaaaattcgtgaagggcggggagaataatggaagatatgaaaaaaggactcattgaacagatgaatcgtcgccagttaaaccaacgtttcaatcaattggttgaatccgccttacaagatccggatgtgcaagcttttattgaggcgaatcaggatcggctgactcaggagacggtcacacggagcgccgctaaaatctacgaatacgttaatgaaaaacagaaattagccaacgggcaaacgacgttagcgcccggatacgcgcctaagctggttttaatcaatcattttattgatgtgagttatgaaccaacggcctcgctaatgaagcagcgggaacaacaagctttaaaggcccgggttaaatcgattaatatgcctaaagatattgtggatgccaatttagcccaatacgatatcaatgaacgtaagttaccgttagtgacggcgctacaatttattgaggatatcaaaaacgccccaacgatttaccaccaaggcttatacctatgtggtaaattcggggttggtaaaacttatctgctaggcgctttggccaatgaactcgcgttagaagggtttgaaactaccttgattcattttccgacctttgcggttgaaatgaaaaatgcgattggtcaaaataacgtgctagataaagttaacgtcattaaaaaagcgccaattttgatgattgatgacattggggctgacgcgttgagcgcgtggattcgggatgaggtgcttgggattatcttgcaatatcggatgcaagaacaattgccgactttctttagttccaactttacgatggacgaactcgaacaacatttaaccaccagccaacggggggataatgaacccgttaaagccgggcgaattatgcaacgagttcgttatttggcgaaagaagtcgaagtatctgggcataatcgtcggttaaattaagctgattaggggttgcataacgacgatgaaagtggtttaatgagtttaatcaatgataaaagacacctattgaatgcaggattgatcagagagaaaaacagcgctgaaagtttttcaaaagcacatttaatggaccactttttgagagttatcgtaagatcgggtcgttaccgttaaagacgctaaagctggagcccaattatttttgggttcaagatgggtggaaccgcgaaatcaattcgtccctgaggtacatttttatatgtatctcagggactttttttattgttgataaccaaaaataaaggagtgtcaaaagatggcagaaattcaattaacgtttccagatggtgctaagaagacttttgatcaagcagctagtctattcgacgttgcgaaatcaatcagtacaagcttagctaaaaaagcagttgctggtaaattcaatggtgaagtggtcgatttacaccaaccacttttagaagatggggcaatcgaaatcatcaccaaagatgatgaagcaatcagcttaaaggcaatttggaataccgctgcgtttgttttagcagctgttttaaaacaacgttatccagaaatgcaatttggtgaagtcaacgccactgaagatggtttcttttatgatactgataaccaaaacggccaattagccgtgactgatttacccgacattaaaaaagcgatggccaaattgattcaatcaggtgaagccattcaacgcgttaacatgtctatggccgatgccaaagcgttgtttgcgggtcaaacttataaattagcattattggataaagtggacgctgatcaagtcctcgtttatcaattagggacttattcagatttcgctttagcaccaatgttggcgaaagtcagcgatgttaaattctttgaactattatcagtggccggtgcttattggcaaggtaaatcaagtaaccaaatgttgcaacgggtttatggcacggcttatccgaaacaagcagcacttgaagcagatttacaacgtcgtcaagaggcgaaagaacgtgatcaccgtgtgattgggaatcaattggacttattcttcgttgatcctaaagttggtgcgggcttaccttactggttaccaaatggggccacgattcgtcgttcaatcgaacgttacatcatcgacaaagaagtcgctaatggttacgaacatgtttacacgccaatcttagcgaaccttgatttatacaaacaatcaggtcactgggatcattatcgcgaagacatgttcccaccaatggacatgggtgatggcgaaatgcttgaattacgcccaatgaactgcccttcacatatccaagtttacaaacatcaccctcgttcataccgtgaactaccaatgcgcttagctgaacttggcatgatgcaccgttatgaaaaatcaggggccttatctggattacaacgggttcgtgaaatgactttaaatgatggtcatacttttgtccgtcctgaccaaattcaagatgaattcaaatcaatcttgaacttaatgattcaagtgtatgctgactttaacatcaacgattatactttccgtttaagctatcgtgatcctaagaatactgagaagtattatgacgatgacgaaatgtggaataaggcacaagacatgttaaaaggtgcgatggatgatcttggcttgaactatgttgaagctgaaggcgaagcagctttctacggtcctaagttagacgttcaaacgaagacagccactggcaatgaagaaacactctcaacgattcaattagatttcatgttgccagaacgtttcgaattggaatatgttggtgaagatggtgaaatgcaccgtccagtcatgattcatcgtggcttagtatcaacgatggaacgctttactgcttacctaacagaaatctacaaaggtgctttcccaacttggttagcgccaacgcaagctatcattattcccgttaagaacgacttgcattatgattatgctaaagggattaaagaagcgatggttaaaaagggcttacgggtccggattgatgatcgtaacgaaaaaatgggttataagattcgtgaagcccaaacaagcaaggtcccttacacattagttgttggggatcaagaaatggctgaagcaacggtttctgtccgtaaatacggcgaagaaaatgccgttgaagaagcgtcagacatgtttgtcaatgcgattgttgccgaagttggtaattatagtcgtgatggcaagaaacacgaaaataaagttaatctataattaataataagcgtttaaatcaccgtacagtatgataatcagtcaactataggtgtggtgtaagctattaaaagagtcatcatttctaattaggaaatgatgacttttttgatagcgggaatgatattaaatgatcaattaattttagcaattaataaggactaaaaacgagtggtctttaatactagtttaggttaaattgaatattattaatgaaattaacgatttataagttgaattggttgtgcacaaccataaaagcgctataatgaaattgtaaacgattacacgatcgatggaggtctttaaaatggcaaataatcaatatgtaacaagttcagcagagaaagcactcaatattatcaatctatacgaactagaagaagatgctggtaaagtgatcccacaagatggctacggctatatttacagcggcgcaggcgatctctatacgattaaagaaaatattgcctcattcaatcataaatatattgtgccccatgttttaagagacattgaaaatccggacacgaagactgaaatatttggcgatcaactgacatcaccaatcatcatggcccccgttgcagcgcacaagctagcgaatacgcaaggtgaagctgccacggcaaaaggaattgccgattacggctcaattctaacgatgagttcatttgcctcagcaagcattgctgatatggcggatgcggcccatggtggcccacaatggttccaactctatatgagtaaagatgatgacattaaccgtaaaatcttagatgaagcgatggctcatcacgttaaagcgattgttttaacggcggatgcaaccgttggtggtaaccgggaaactgacaagcgaaatcattttacgttcccagttggcttaccaattgtggaagactaccaaagtggtgtcggtcaaacgatggacgtggtttataaatcagctaaacaaagcctaagtcctagagacgtcaaatttatttctgattacacgcatttaccagtcttcgtaaaaggggtgcaaacggcagaagatgttgaaattgctcttcaagcgggtgctaaagggatttgggtgtcaaatcacggcggtcgtcaattagatggtggaccagcggcgtttgattcattgcaagtggtcgctaaagccgtgaataaacgggtgccaatcgtctttgatagtggtattcgtcgtggccaacacgtctttaaagcgttggcatcaggggctgacatcgtggccattggtcggccagtgatttacggattagccttaggtgggagccaaggggtcaagagtgtctttgattatctccaaactgaattagaacttgtcatgcaactcgctgggacccataatattgatgaagtgaaggccacacaattactcgataatttatatggtaattaaagcttgacttcataatctaatctcggtatactaatgtctgttgagaaataaagcagaagttcccgcttctcgcctaagtagacacttgatgtctctgggctgatagtttctaattcggacgaattaagtcattagaacgcgcgggcctttctgttgaaagggcccgttttttagtgcttagctgcattttctctttaaactttatggaggtgaaagtcatagcaaaagatttgatggttaacgatggtattcgtgcacgagaattgcgtttaattgatcaagatggcgaacaacttggtattaagagtactcaagatgcgatcgcattagctgaacaagctaatatggatgtcgttttggtgtcaccaaacgcaaaaccacccgttgctcgtattatggactatggtaagtatcgtttcgagcttcaaaagaaacaacgtgatgctcgtaaaaagcagaaaaccattaacctcaaagaggttcgtcttagtcccacaattgaacagaacgattttaatactaagttgaacaatgcacgtaagttccttggcaaaggcgataaagtgaaagcttctattcggtttaaaggtcgagcaattacgcataaagaaattggtcaacgcgtattagaaagacttgctaaggaaacagcggacattgcgaaagtaactgcacgtcctaagatggatggccgtagtatgttcttaatgttagaaccgcttaaagaccaaaaataaaaacctgtttctgattcattaggaggaaatatcatgccaaaatttaagacacatcgtgcttcagcaaaacgttttaaacgtaccggtaatggcggtttaaaacgcgcccatgcctatactagtcaccgtttccacggtaagagtaagaaacaacgtcgtcaattaagaaaatctggaatggtttcaaatagcgacatgcgtcggatccgtcggatgttaacaggtcttaaatagacatctgaacgtcagtaaaaattagatcagtacaacaacgcattgacgttgtttgttattcaaggaggaatttcttatgccacgtgttaaaggtggaacagtgacgcgcaaacgtcgtaaaaagattttaaaattagccaagggttatcgcggcgctaaacatttattattcaaatcagcaaatactcaagtaatggtttcataccgttatgctttccgggatcgtcgtcaacgtaaacgtgacttccgtaaattatggattactcgtatcaacgctgctgcacgtttgaatgatatttcatacagccaattgatgcacggcttacgtttagctgaaatcgatatgaaccgtaagatgttagctgatttagcggttaatgatgctgctgcatttacatcagttgtagatgctgctaaagctgcattaaacaaataattagttattaagctattcaaaaaggcttcgtattctatttagaatatgaagccttttaaattagctaaaattaagtgattaacgtgaaatgatgattttaccaggggcgtgatgagtagctaataattgatgtgcggtaatcacgccgtctaaagtgaatggcaacgtttcgtgaacggtgacatgaattaacccttgatcgattaattcacttaaatcttgaagagccgttaaagcaggttggtccttgcgtggataaaccatttgataggtgacatcggttaattgctggtcctcagttggtaaaatggtggtgctggcaaaatagccattcggtgcaattaattgattgagtaattgggttgattcaggattctgactcgtgttaacgccaattttaatttgacggttaattgtcgctaatgattctggtgcgtcgtaagccagaatatgttggacaccaaatgattctagatattcgcggttgcgactgtgcgcaatggcggttacgtctagatgggccgctaaggcgagttgaacgagtaaattacccacagcaccactagcacccatgatcgcgattgaatcgccgtgtttgaaatgcgtaaagtgcatgagcgtattgtaggccgtgatgccagcggttggtaaacccgcggcttcagcgatacttaaactaacgggtttacgaataatcttattcgtcgaagccgttacaaattcgctgtagccacccagactgcgatggttaatcacgatttcaccgacgcggtagtcatcaacggcgctgcctagttcgacaatttcaccgacgacatctgcgcctgggaaaattgggaatggcaatgggcgaacggtttgttgattgccactccgtaaaagtgcatcgtaggggttgatcccgaaagccaacactttaatgaggacctgttgttctttaggaactggtactgcttgttcaaagcgttcaaaaacggttggatcaccaaattgattaaaaccaaatttttccataacaacacatcctttacaatttctttaaacgtaacagaaagcggtttaaaagtcgactagtttgacttattacgggctttttatcgaataatcggggattaatgagtctgaaataattaattgtagacaggtgcaatttagtggcaaataccctataattaaccagtgactagataaaaggagacaatgcatgttaaataactttaaaccaacctggatggtcaatgcaatttacgacttaacaccagcccaattgcaggctcatgggattaaagctgtgttgacggatttagacaacacactaattgcctggaataatccaaacgggacaccgcaattaaaagtgtggttggcccaactagaagctgctggcattccggtaatggtcgtttctaataacagccatcaacgggttgaacgtgcggtagcgcccttcaacctgccctttatttcacgggcgaataaaccacttgcgggcgggattaccaaggcacatcaacaattgggattgtcacggcacgaagtcgtgatggtcggcgatcaattgattacggatatgcatgcgggtaacgtcgctggcgtgcggaccattttagtgaaacccattatcgatagcgatgcttggaatacgtcaatcaatcgattctttgaaaaatatatgatgcaacaactcttaaaaaaacatactgacttaacttggcgggaggatttaaatgactgattcaatagaagaacaaacacaagaagaactattttgcatcggctgtggtgcaaagattcaaacaacggataaaaatcaattagggtacacgcctagctcagtcctgaaaaaaggattggaaacaggccaactttattgtcaacgttgtttcaaattacgtcattacaacgaaattagcgatattcaattaagcgatgatgactttttagctttattaaaccaaattggtgatagtgacgctttaatcgtcaacgtggtggatatttttgatttcaacgggagtattattccagggttacaccgatttgtcggtgacaatcccgtgattctggttgggaataaagtggatatcttaccaactgctttgaatccgaataagatgattaattggattcaaaaagaagcgaaagaacaaggtttacatcccattgaaacgatgttgattagtgctaaaaaaggcaattcggtcgatgaattattagccttgattgatcgcgaacgtaaaggccgcgatgtctacgtcgttggggtgactaatgttggtaaatcgacgttaattaaccggatcatcaaacagacgaacgggatgcaagacgtgattacaacgtcacaattcccaggcacaacgttagatcggattgaaattccattggatgacggccatgctttaattgatacaccagggattatccatgcccaacaaatggcccattatttacatgacaaagatttacgcttgattgcccctcaaaaacaagttaaacctaaagtttatcaattaaacgcgggtcaaacattgtttttagctggccttgcacgttttgatttcattcaaggcgaccgggctggtttcgtgggttatttcgacaatgaactttacattcaccggactaaattagaaaatgcggatgatttctacggcaaacacttaggtgatttattacagccaccacatccagaagatttagcggattttccagaactacaccgttacgaattttcgacaaagcaaaagagcgatttggtctttgccggtttaggttggattacattaccagcagacgtcgttgttgctggttatgcgcctaaaggggtttcggtcatgattcgtaaagcacttatttaataatcagaaagaggttgaacttgtgttaacaggcaaacaaaagcattatttaagaggtctagcacagaccaccaaacccctattccaaatgggtaaaaacggtttgagtcaaacttattttgaacaaatcgaagaagcaatcgaaaaacgtgaattggttaaaattaaccttttacaaacgacggaagtcactgttgatgaattagcgaactatttaaaacaacaagacagccggatggaaattgcacaaaaaatcggccggactttagtcgtttataaggcttcgcataaagaaaaatatcaaaagatttcaccaattgtgaccaaactcgggcgttaatcgatagggtgatgagatgcaaaacacaacattgaaacaaaccaccattcaaacggcaccagacgaactagtggccgtcaatggccagcgtccacaagtcgggattatggggggcacctttaatccgccacatattgggcatttgatgatggctgatcaagccgctaatcagttggggttagattacgtggtatttatgccggatgctaatccgccgcatgtcgatcataaagagacgattccggccatccagcgcgttgaaatggttaaacgggcgattgcggctaatccgttatttaaactctcattagctgaaattgaccgcggtgggattagctatacgtacgatacaatcgtcacgttgaaacaacagcaccccgaaattgattattacctgattatcggtggcgatatggttgattatctaccgacttggcaccgaattgatgatttagtccaattggtccaaattgtgggggtcgaacggccggggtattcgaaacaaacgccgtatccggtgttgtgggtcgatgcgccgaccatcgcgttgagttcgacgcaagttagacagaaggtgcaacaaggctgttcgattcgttatttagtcccagaagcagttgctgactatattgaagaagaagggttatatcatgagtgaattcgtttatcaggccgatttagtgccgtatacgcgtgctgaattagtcgaaaaggtggccgctaatctatcaaccagtcgttttgaacattgtttacgcgttgaacaaacggcgattgaattagcccgtcaaaatggcgctgacgttgaacgggccgccattgcgggtttggttcacgattatgccaaacagctaccagatgaaacgtttattgcggcgattcaagccaatcattttgaccctgatttattaaattacgggaatgcgatttggcacggtgtggttggtgcgtatttcattgaacgtgatttaggcatccatgatgacatcatcttgaatgccattcgccgtcacacgattggggcgcctgaaatgaccctgatcgatcaaatcttgttcgtcgccgactttatcgaaccaggccgtgattttccgggcatcgagcaagcgcgtcaaacagcaaaggctgatttagcagccggtgtgcggtatgaaattttaaacacgttaagttttttaattaaaggtcaaaaaaagatttatccaaaaacaattgatacttacaatgcctgggtacctactcaggaacaataaaggagaattattagtgaaaagtttagaaatgttagaaattgcggttaaagccgctgatagtaaacgcgcagaagatatcgttgcgttaaatatggaagggatcagtttattagctgattattttgtcatgttaaccgggagttcagaacgccaattaaaggcgattgtgactgcaattgaagatgccgaagaagaaaagggcgtcttcgttaagagtatcgaaggtaaaaaaggctcacgttggatcttaatggattttggcgatttagtgattaacgccttcatgtccgaagaacgtgatttataccaactcgaagaattatgggatcaagcaccaaaggtcgatgttgctgattggattacggcagaatgatttatcaaagttttgccaccgtctatgatcggttgatggatcatagtctttacacgcaatggcgtgattatacgcttgaacagctaaaaggccaagctagcgtcttagaactggcttgtggggctggtgatttagccattttactcaagcaagcggggttggacgtcgttgggttagatttatccgaagagatgctcagtattgcgtctgaaaaagcgactgaggcggatgtgactttgcccttattgcaaggggatatgacggatttaggcgaaattgggacgtttgatgcggtcacgtgttttgacgattcaatttgttatatgcccgatctcgaccatgttaaacaggtctttgaacaggtttatcaacggttaaacgttggtggccagtttttatttgacgcccattcgctccaccagatggatgacttattcccaggttttatgtataacgataaaactgaagagacggcttttatgtggaccagttatgcgggcgaagtgcctcattcggttgaacatgatttgagtttctttgtttgggatgaccaaatcgacggttatcaagaattgaatgaattacatcatgaacggacttatccgctggctgatttcacgacgactttggaacaggttggtttcaaaaatgttcaagtcagtgctgattttggtcaaaatgcggttcaaaccgatagtgttcgctggttctttagcgccgttaaataggagttgctatgaaagttacggggattatcgctgaatataatccgttgcacaacggtcatcgttatcaattacaacaggcacgacaaacgtcacaggcggatgtcgtgattgtttgtatgagcgggaattacgtgcaacggggcgaaccggcagtacttgataaatggacgcgtgcgcaacttgcattggctgcgggggcggatatggtcgtcgagttgccatttgcgagtgccgttcaaccagccgaccgatttgcgactggcgcgattgatttattagcccaattggggtgtcaaacagtggcctttggtagtgaagaagcggcttttgattatcaaacaatcgggcaaaagattgcggctttaccggcgcagtctgcagcctttgtcgattatcaaaaaacgtatgcaacgcagttaaatgaattctatcaacaaacgttgaacctttctatcgatcagccgaatcatttgttaggcattagttatgcggtcgctaatgcacgattagcacaaccgatgcaattggtagcgattgaacgccaacaagcgcaacatgccgaccaattgattcaaactggggtgtacgcgagtgcgagtgcgattcgcaaagtattggcgcacacgccagttgatttgaccacggttcaaccagtcgtgccggccacaaccatggcggctttaacaacgcagcagggggtccagtggtcgcaactgtggccattgttacaataccggattaatagtacgccgttagccgaattaagacaggtctaccagatgtcggaaggcctggaataccgttttaagaaggttatcacccaagttgacagctacgaagcgttattgcaagctttaaagaccaaacggtacacgtatgcgcggttacaacgcgtttgcttatacgttcttttaaatattaaagatacggcgattcagcaaacccttgagcagccgtatgttcgtttgttaggatttaaccaagtcgggcaaacctatctacaccaattaaaaaagcaactgacttggccgttaattagtaaaatttcggcgaagctgggggccgagactggtttgttaggattagaagtgcgtgtcgatcgactctttgagcaattgacgaatacgcatcagaattttgcaagacaaccacttttttatcagggaaaggatgttgaataatgttacaatggtcagtccaagctttacaaaaacaccgcgatcgaccacttccgtttgaagaagtgctcgcactaaaggggaacttgcaagaaagagaacccgatattatcgatgtctctgaatttaaagttgatggccaattaaccgttgatcaacgggcaattattgccgttgttcacgttgtcggccaattaacggtaccttcaacacgcagcttgttacccgttgaattaccacttgattttaagtttagtgagatttatgtcgatcctgaagatgaagatttagatcggtttaccgatgctgatatgttgttcccattggaaggcgaaacattaacgttacaaaatgcgattgaagatcatatcttgttgcatattcccagccacattctaacaaccgaagaagaacaggaaaacgtgatgccagctggcgaagcgtgggccgtgatttctgaagaagaatttgcgcagaaacaagctgaagaagaatatgcaccgaatccagaattagcgaagttaaaagaaatgttagatgctaaaaacgatgacgccaactaagctggcgtttttttgtaccaaaaattaaaatggaccggtccatttcggttaaaatccttttatttgagccccaattctgctaacataatcagagtaaacacgttactggaaaattaatgggtgacgattaaaattagaacattattaggaggccttttacatgagtcaaccacaaattggtgtcatcgggatggcagttatgggcaagaatttagcattaaatatcgaaagtcgcggttacacagtcgccatttataaccggacaggttctaaaacggaagcggtcatgcaagaccacgctgaaaagaaattggtcgctagttacacaatcgctgattttgtgaagacacttgaaaaaccacgtcgaattattttgatggtcaaagccggtgctgggactgacgcggtcatcactgaattattacctttattggataaaggtgatgttttaattgatggtggcaatacattcttcggtgatacaatccgtcggaataaagaattggataagtcagggattaactttatcggcatgggtgtttctggtggtgaattaggcgccttagaaggcccttcaatgatgccaggcggtcaaaaggaagcttatgacctagttgccccaatcctagaacaaatgtcagctaaagctgaagatggtcaaccttgtgtgacttatatcggcccgaatggtgcaggtcattacgtgaagatggtgcataacgggattgaatacggcgatatggaattaatcgctgaaagttacaacttactccgtaacgtcgtcggtttatcagttgaagaaattgccgcggtcttccaagaatggaatcacggcgaattggatagttatctaatgcaaattacagctgatattttgacccgtaaagatgatttagaaactggtaaaccaattgttgacgtgattttagatgcagctggcaataaggggactggtaaatggagttcccaaagcgcgcttgaattaggtgtgccccaatccttgattactgaatcagtttatgcgcgttatatttcagcgatgaaggacgaacgagttgcggctagcaagattttaccagccccaacggttgctaaatttagtggtgatcaaaaagcgatgattgaaaagattcgccaagccctctatttcagtaagattatgagctatgcccaaggtttcgaacaaatgcgggtggcttcagatcattatgattggtcattaaattatggtgaaatcgctaagatttggcgtgaaggttgtatcattcgtgcgcgcttcttacaaaagattaccgatgcctttaatcataaggccgatttaaataatttactattagacgactatttcttagagatcactaaaaactatcaaggcgctgttcgtgatgtggctgctttagccattcaacaaggcgttccagcacctggtttaacagcagcgattacgtactttgattcatatcgttcagaagtcttaccagcaaacttaatccaagcacaacgggattactttggtgcgcatacttacgaacggacagatcgtgaaggtattttccattacacatggtataaagaacaataaacttaatactgagtgtcaacatccacgggttgattctgagcattaacagaaaatcccccaattatcttgattttaggataattgggggattttaggttaggcacaggaatcagtgggtgttggcacgttaaagtctgagtgttaaactcagccaatcagcttctgagtatagcctaaaatcgggaatcatgactaagtaccgtcataattcccgatttgtagctagacggaagaagttagctcagaagcatgttatcaattgcttatccagttgaaccgaaattgatgccttctggcgcgcgtcaaagcagcctgtttgtttaatatcagaacactaagactcatcacttattttgtatagtcattttaagtcttgaatttaacgacataatggctacagctagctagtttagttagttatttagcccaatctatgctaaaataataaagagaatattctgtgtaacattaattgatgatgagtaaaagcgtcggttagatgagcttttatggcaggcatcaaatttcatttctggggagtgaccacatgagtcgcatattaattattgaagatgaaaagaatttagcacgatttgtagaattagagctaaaacatgaaggttatgaaactgaggttcattttaatgggcggactggtttggaagctgctttaaatgaagaatgggatgccattttattagatttaatgttaccagaattaaacgggttagaagtttgtcggcgggtacgccaggttaagaatacaccaatcatcatgatgactgcacgtgattcagtgattgatcgggtctcaggccttgatcacggtgctgatgattatattgttaaaccatttgcgattgaagaattattggcgcgtttacgcgctttgttgcgccgaattgatatcgaaggtgaacataatgctgcgaaacaaacaacggttacttatcgtgatttaacgattgaaaaagaaaaccgagttgtgcggcgtggtgacgacatcatcgaattaaccaagcgggaatatgaattattgttaaccctaatggaaaacgtcaacgttgttttagcgcgcgatgtgctattaagcaaagtttggggttatgattcagacgttgaaaccaacgtggtggatgtgtatatccgttatttacgtaataagattgatcgtgctggcgaacaaagttacatccaaacggttcgtggtacgggttacgtgatgcgctcttgatgaatgcggaacaagaccaacccattgaagtcgttaataagggtcgaaaaatatcgctaaaagtaaaatgggcggctgccgtcgggctagccatctttattacttttgcgattttttcaattgttatttcgagtagtatttccaatattttactgaataaagaaatcgataacgttcatgatacagttctagtgatccaacagcgcttagcacaagcggatcaaccgttatccacccaatatgtgacgaatcaactcgaccccgaattgcggggctctaaatcaatttatcaagatacagccttaatgcgattggcccaacaagatatcacggttaaagtctttaatgctgataaacaaggggtttttgcctcccggggttcagttgggacttttccaaagggtgatagtaacacgttgagacgccaaaacacactcgggcaaacccgattagttggtattcgaccgattaaagcggggcgttccggcaaagtaattgggtacgttcaagtgcttaataatctacgcgattataatcacgcgatgaatgaattacggattgtgttagtcgtggccgtgttgtttgcgatgttatttagtgccgtgattggttatctattggccaatcaattcttacaaccgattgaagtcatgaaaaagacgattgaaacgattaatatagaaccaaattcagctgtccgaattccggaaactgggcgcagccaagacgagttatcggatttagggctcgcttttaatgcgatgctcaatcgaattcaacattattttgaacaacaagatcaattcgtgagtgatgtctcgcatgaattacggacgccggttgcgattattgaaggccatctacaattattaaatcgctggggcaaggatgatccagaagtgcttgccgaatcgttagcggcctcgttacaagaaatattgcgtatgaagaatttaatccaagaaatgttagatttaacccgagccgatcaggcagtgactgaagggaccgcggaagtcaccgatgtcggcgaggttgtgttacagaattatcataactttgaaatgctctatcccgattttacgtttattttagatgatgatttgcatcaaccggcgttagtcaacgttaatcggaatcatctcgaacaaattatgattattttattggataatgcgattaaatatacaacaactcgcaaggaaattcacattgcggttgccagtgatgaacgttacgcccaagtcgccgttcaggatttcggtgaaggaatttccgaagctgataagaaacgcgttttccaccgtttctaccgggtcgataaagcccgtagtcgtgaaaaaggtggtaacggcttaggattagccatcgcgcaacaattagttgaagggtatgaaggtaatgtgtcgttggaaagtagtgttgggcatggttcagtcttccggattgaactccccttaaaactagcctcaacgactgaacaagctgaagaaaaccattaaaaaaacaggtgtcaccgcttgattcaaagcgatgacacctgttttttaaacttaagcttgtggtttgtgattctgtttacctgaattacgtttgtgatcagttgtgtgatttgaatgatcatttgttttttgatttgttttgacggttgtttcgctagccgcagctgcgggtttaacggattttttgttaaacatctcgcgagtgacgactgtgacaattggattttctgcgatttcagcatcgacccgttttttaacacgtggcatgatgacgaaagtggtgaggacttgttgaataatcatgatcatcccacccgccaagaagtaaagggctaaaccggctggggcgaataatgaaatgaagaaggtaatcgcaggactcattaggaccgttgtttgcatttgtttcttttgttctgcgggcatgccaacgagtgacaacgcgctttgaccaacgtagaacaaggtagctacaattgtaataatgatgttcggttggcctaaaccaatgcctaagaaatggctgcttgaaatttctggtgaatattgaatggcttggtataaaccagagaaaattggtaattgaatgattaacgttaagcaaccgagactaggcatcatgcttgagccgttttctttgtagactttcatcatcaattggcttaattctgctttttcttcaggcgaagtcgccactttttgttgttcttgaataatgtctaattgtggttttaagcgacgggtcttttcttgttgttccgtcatcttgttcgattggttgagcattaatggtaatagaatcatccggaccacgaaggtgatgatgatgattgcccagccgtagccgtttaaaccaccgaagaagttcgcgatgctttccattaaatgttgcaatggcacggcaatgtatttgtacgatgaaccgtaaatcaaaccagttggaatcttaggatgggcgctcatcttttgtggcacacagccagccaagaagaacgtcatcgtcactgctaacattgcaagcgttgcaatgcgtttattttttttcataaatttaaccctctcaagtaaagtttcaacaagagtaactatactggaaggaacgccgaatttcaaccgacaaccgaaaatttacgacacagtgacacatcagctagctcggtttgaatcaatttagtcacgtgaccactggggctcggggacgctttaacggccccgataaattgttgtaaagtagcggattcaccgattgcaataattttgacggaaccatcggcttgattggccacggtgcctttaatcccaagtttgtcagcgacgagtttggtcatccaacgaaaaccaacaccttgcacgcgaccgtagacctctaattgaactgctttttgcatttctatcacctcaatcactattgtaaggcgttcaatcgattttggcgactaataagaatggtcgccatagctattggggggcaaatcgcgtataataataggtactaaatagactggagcacattatggaatacattcaatcgaaccaaaatgctaagattaaagctgctaaaaaattaacggttaaaaagaatcaacgtaaggaaaatacttatttattagaaggttggcatctcgtgcaagaagccatccaaagcaaagcgacgattcgccaaatttttgcaacggataaatatgttgaagaacgcgctttacgtggtttctacgatcaaacctttgaaatcgcccctgaagtggcgcaacatttaagtgaaaccaaagcccctcaaggtatctttgcagtcgttgaactcgttgaaaacaccgtgccagaaacattagaaggccgttatctcttgttagacgccgttcaagatcctggcaatatcggcacgatgatccggacagcggacgctgctgggtttgctggcgtggttttaggtgaaggcagtgtcgatttgtataatcctaagttgttacggtcaatgcaaggtagccattttcatttgcccgtttaccaaggtaagttactggattgggttaaacgattccaacaccaatcagtccccgtttatggcactgaattaaaccaatcagcaattagctatcaagctgtccctaaagctgataatttggctttgattttaggcaatgaaggcaatggtgtcagtgttgatttactattagcagctgatgataatttatacattccaattccaggacacgctgaatcattgaacgtcgcagttgctgctgggattctgatgtttaaattaatcgaaggctaaatcgttaagtttttctaatagtcaaaactttttaaggcgtttaacttcttttttggtgaaaaagctgttattctatgggcagaatttaatttaaatcatgtcaggagtctttgaatgaatacatctgctaaatggtccactgatgaaacgtacatggcaattattgccgatttgttagaaaaaccagaagtgcaacagttggctaattacacccaacatcatcattctgaccggttggaacattctttgagtgtttcttaccggagctatgaagtcgcccttaaatggcacctaaacgcgcgttcaatcgcacgggcggggttattgcatgatctattctattatgactggcgcgatacgaaatttgatttagggacccacgcctacgtccatccaagaattgcgttgcgcaatgcggagaagttaacggaattatcaccactggaaaaagacatcattgttaaacacatgtggggtgcaacggttgggttaccacattatcgggaaagttacattgtctcgttggtcgatgattattgtgcgattaccgaattttgttcacccgtttggcaaaagatgaagaagcgttgggctaaaccagttgcgtcatcacaaatcaataaatagcttaggctaaaagattgatttttgaaacaatattcagtacacttattattaataagtgtgaggtgaaaaaaatggatatgattaaggaaaaggtaacttctgactgtcagaaggcctttcaactttgtcctaaatttgaaaaaactttttcaattttaggtaagaagtggaatggtctgatcatagatgtcctattagaaaatgggacgcaacgctttaaaaatttggtgcacagtgtgcccaaatgcagcgatcgcgtcttggtcgagcgactaaaggaactcgaacaggtcggtgttgttgaccgcattacgagtacggattcatcattaattgaatatcgtttaaccaccaaaggtgaagaattagcacccgtaatggcggctgtccacctttggtctgataaatggtgtgacgcagaagatgagttgcgaaattaattaaattacgctaaaataaaactattaaaacaaagacgaaaaagagtaacctattaggccgttttaacagggagaataaccagttgactggaagttattcaaacgggattaggtgaagttcactttcagagttgactaatcaagtccggtgttgcccgttatgcaattttgagtgtgcagttaccataactgtaaactagggtggtaccgcgaagcttcgtcccttttgagggatggggttttttttgttgttaaaaataaggaggtcaaagcatgtcattaaaagaacagttagaagccttgcaacaaaaaagtttgcaagagattcaaaaagtcgttgatttagacgcgttaaatcaaattcgggttgaagtattaggtaaaaaaggcccgattaccgaagtattacggggaatgcgtgaccttagtaatgaagaacgaccaaaagtcggcgcgtttgccaatgaaattaagagtgatttagcgcaagccatcgaagctcgcaaagccgaattagaagctaagaaggcctccgcgcaattggcccatgaaacactcgacgtgacgttacctggccaaccagtggtcaaaggcacccctcacgtgttaacccaggtcatcgatgatctagaagatttatttgttgggatgggttaccaagtcgtcgctggttacgaagttgaagatgaaaagcataactttgaaatgctcaatatcccagccaatcatccggctcgcgatatgcaagacacgttttacatcacgaaagagacgttgatgcggacgcatatgtcacctaacgaagcacgtgatttagaaagccatgattttgcgaacggtccaattcgcatgattagcccagggcgggtctatcgacgcgataccgatgatgcgacccattcacatcaattctaccaaatggaagggcaagtcattgataagcacattacgatggctgatttgaagggcacgcttgaatacacgattcgccacatctttggcgaagatcgtcaattacgtttccgtcctagctatttcccatttacggaaccctctgtcgaagtggatatttcgtgtttccgttgtaatggccaaggctgtaacgtctgcaaacaaaccggctggattgaagttttaggggctgggatgacgcatccgaacgttttaaaagccgctggtgttgatcctgacgtttatggtggttttgcctttggtctcggaattgaccgctttgcaatgttgaaatatggtgtggatgatattcgaaacttctacttaaacgatgttcgattcttaaatcaattcacacaggagggctaattcatgaaagtatcttataactggttaaaagactatctagatttaacaacagaaccagccgcgttggctgaaaaaattacccggactgggattgaagtcgccggcgtgacgcaaatgagtgctggtctgaaaaagattgtcgttggtcatattttgagttgccaaccgcatccagattcagatcatttaaacgtctgccaagtcgatgtcggcgaagacgaaccgttccagattgtctgtggtgcaccaaacgtggccgccggacaagatgtgattgtcgcattaccaaattcacgaattgccgataacgttaaaattaaaaaaggtaagatgcgcggcgtggcttccatgggcatgatttgtggcctccaagaaattggttttgctgacagcgttgtcccaaaagcttatgtcgatgggatttttgttttcccagaaagtattgaacccggcaccgaagtctatgaagcccttgggatgaccgattcaatcatcgatttagatttaacggctaaccgcgcggatgcgatggggatgcacggtgtcgctcatgaagtggctgctattgaagatttacaaccccattttgaaaccgtgacggtcgctgaaagtgacgtgacgacggcctcacaaattagcgctaaagtggctgatgcaaccttggcgcctagctaccaattacgaatggtccaaaatgtgacgattcaacctagtccactctggttacaaacccgtttatggcacgctgggattcgcccaatcaacaacttggttgatgtcactaattatatgatgatgacttacggtcaacccttgcacgcttttgatgccgatacactaaccggtactgataaacaaattgaagtccgtttagcacaagctggtgaaaagctagtgactttggatgaagccgaacatgaattaacgactgaagatattgtgattaccgacggccaccaaccaatcgctttagccggtgttatgggtggtttggcttcagaaatcacaccgcaaacgacgaatgtgattatcgaagcagccatttttgaacggacggcggttcgtaaaaccgcccaacggcataatttaagatccgatgcgtcatcacgttttgaaaaaggcgtcaacgtagctgatgttcaagtggcgttagacgctgcagcggctatgatggctgaattaggcaacgggcaagcgaccgctggcgttgtgagtccaacccaattggctcccgttgccaaagtggtcgaaattgaagcgcaacggatcaatcatgtgttaggcactgatttaacggttgaaacaatcatcacgttgttaaaccgttttggttttgctgttgcaaacgatgaaggtcatttgaccgttacgattcctgcacgtcgttgggacatcgagattgaagccgatgtgatcgaagaagtcgcgcgtctatacggttatgataatttaccaagtacactaccaaccggtgccatgacgactggggcgttaaatgcaacccaaaaagccctacgccacacgcgccatttcttggaaggcgctggtttaacccaagcgattagctacgcgttaaccacgccagaaaaggcgcaacaattcatgttacggcccgcaacagcgaccgttctagattggccaatgacccaagatcattcagatttaagaatgaatttaatcactggtttgttggatgatgcggcctacaatgtcgctcgtaaacaaactgatttagcgttatacgaacaaggtcgggttttcttgaaaacaacggctgaacaagatcggcctcatgaattagaatacgtcgctggcttgttaagcggcaaccgtcaagttaaatcatggcaagtaaccgctgaagtggttgatttttatacgattaaaggggtcgttgacgccttattagcaagctacaatttagtggatgatgtgcgttatgttgcgacgagtgaatttgctgaaatgcacccgggccgcacggctgcaatctatgttggtgaaattttggttggttttgtcggccaagttcatccgcaaattgccaaagcaaatcatttaaaagaaacttatgttttccaaattgatattgcgcaaattctagccttaccaatgcaaacattaattgctaaaccagcgcctaaattccccgaagtgactcgagatatcgcgctccaagtcgctgaatcagtgacgaatgctgatttagtagcggcaattcaagctaagggcggccaacatttggtctccgttcagttgtttgatgtttatgccggtagtcatattgaagccggtgagaaatcaatggcgtatacgttgacgtatctcaatgaaagcgcgacgttgacggaagaagaagtcaccgctgcttttgaaaaagttgtcgcccatttaatcgcgacttttgacgcaaaagtacgttaataccgaatctttaatgcaatttataaaatttttggtataatgttttaaggattgtatttaaaagttctattaggaggtcatcctttgaagaaagctgatcaaaaggagccagttgaacaaacatcagaacaactatacgcagaacgacgggcagaaaaaaaagcggccaataagattgtttattggattattgggattgcgctagcgctcgttgtgattattggtctaatgggttatcggtatgtccaaacatcattgaaaccctataacgctacggctaaaactgaaattacggtcaagattccgaacggatcaaccaataaggaaattgcggccattttacaagaaaagaaattaattaagagtgcaacggttttcaattactacgttaaaacccacaatttttcagatttccaagcgggttatcatgtattgaaacaatcgatgggctttgaaaagattatttcaaacttgcaaaaagaaggcacaccaacccgaccacgggacgttaccggtaaggtcttggttaaagaaggggtcacgcttgaagaaatcgcaacagcggttggtaagaatactaagtattcaaaagcggacttcattaaattaatcaaagacaaacaattcttagcgagcttgaagaagaagtatccagaattattaacgtcaacgatggctaagaaaaatgtccgttaccatctagaagggtatttattcccagctacctatgaagtttataaagacagcacgttaaaagaaattgtgactgaaatggtcaaaacaacggatcaaaacttacgaccttattatgcaacgattaagagcaagaagttgacggttcaagaagtcttgaccttggcttccttagttgagcgtgaaggggtaacggcaagcgaccgtcaaaagattgccggtgtcttctttaaccgactagacattgatatgccaattcaatctgatatttcggtcatgtacgcgttgaacacgcataagacccatctgtataataaggatgttcaggtcgattcaccctataacttgtacgtccattcaggttatggaccaggaccatttaattcaccaagtttacaatcggtaacggctgtcttgaatccgtccgaacgcgatcaagattatctatactttgttgctaatctcaaaactggtgaagtctattattcacatacattagatgaacatacccaaacaaccaattcgattgaagattaactggtaaatcgtggaagtcgacctcaattggggtcgacttctgtccgttcaaaaagaagtagagaataaaggagcgtcccatgtcgagtcaaaagaaagcaccaattattatcggagttaccggcggatcgggtagcggtaaaacaaccgttagccaagccatcgccactaaatttgccaatcattcggtgatgttattaccacaagatgcttattataaacatcaagacttaccgtttgaacaacgacaacaaaccaattatgatcatccagatgcattcgatacggatctgttgttggcgcaagtgactgaattgaaacaacatcgagcaattgaacaacccgtttatgattatacgattcataatcgaacggatgaagttgtccatgttgaaccgcaagatgtgattattttagaaggtattttagtgttggcagatccacgattacgtgatttaatggacattaaggtttacgtggataccgatgatgatattcggttattacggcggatgagtcgtgatatggaagcccgcggccggagttttgacgacattgtggcgcagtatttgaagacggttaaaccgatgttccatgaatttatcgaaccgactaaacgttatgcggatttaattgtccctgaaggtggcaataaccgtgttgcgattgatttgttagtcacgaagattcaatcgattttacatgcttaattaaaaaataacgaaataaatgaggtggctaagatggctggaaaaaaatatccaatgaccgaagctggtaaagcaaaattagttgaggaattagaaacgttaaaaatggttaaacgaccagaagtcattaaccggattaagattgcgcgtagttacggcgatttatctgaaaattcagaatatgaatcagcaaaagatgaacaaagtacgttagaaagtcgtgttttagaagttgaaaatatgttacgttttgccgaagtaatcgatgctgatagcgtcgcagacggcatcatcgcggttggtagaaccgtgactttcacagacgatgaagatggcgaagaagaaacataccaaatcgttggggcggctgaatctgacccacttgcgggcaagatttcaaatgattcaccgattggtcaagcaattgttggcaaacaagccggcgacaaagtggtgattcaaacaccaggtggcgatatgcacgtcacgattactgacgttaaataaaggttctatcaaaaaaagacaatcgaaggattgtctttttttgatgagactgattgattaatcgcttaatatcaagtctactttacgttcatttcatctaaaattaaacgaagttgtgcgatttcatcgtttgttagggtgacacccttgcccatcttctcgtgatttggggcccaatcccgtaaatcaaactttggttctcgaccgttccaagcaattaaattcagttctttttgccagcccgccttattttgactcaacacaccgatttctgctttaatctcatattcaatattagccatcttatcaccctttttctgtttacttaattatacccgaaaaaaaataaaaattgcgacttgcaaatcagaacatttgttcgtataatagaaatacaaacaaatgttcgggggataattaatatggaattcaaacaagcacaggtcgtcggttttagtcagacactcatcaagcggtaccaacagttcttcgaactcgcgccgcttaatcatgattttgttgatcaaccacagatgcaatccaagcagattgccctttatttgacgcaggctttccaacaccattatcaattaaccgttcaattcaacgtgcaagaccacgtccaacaagtgactggtcaactgatccgccaaatcaacgcaacgacttacctcttaaaagaaagtcgttcaaacctttacaaaattgtcacagccgatcaagtccgctacattcttaaaaactagccctattcaaaaggccctcatcaaaaaatggatgggggccttttgatttgcgtattgaactgctgttacaacttctttttagcagcttccgctaattcgactaactcttgagcatgttcactcgttagttcagtgacttcggtaccggctaacatccgggccaattcggcgacccgttgttgacccgtcactctttgaacggttgtttccgttcggtcgtggttgatctgctttttaatttgatattgatgatcactcatcgcagcgacttgcggcaaatgggtaatacataaaacttgtgaatgttgcgcaatttgataaattttattggcaatggcttgggcaactcgcccactgacgccagtatcaacttcatcaaagatgatactcgtcaccccttgtgattcagaaaaaatcgttttaagggccaacatcagtcgggataattccccaccagaagcggtcttagccagtggccgcattttttcacccggattgggttgaatataaaattcagctttatcaattccggtactcgttaactgagtggtgccctccgtaaagtggacggtaaacaccgttttatccatatataaggctttcaactgttgatgaaccgcgatttctaagcgttgagccgcttgctgacgtaattgacttaattcggtcgccaattgcgttaacgcgcccgtttgctgtgctaattgttcttccaattcagtggcattcgcttctgttgcttgcatcgcttgcaattctttagtgatacgttggccataagctaaaatttcagccactgaatcgccatacttatgttccaattcagtaatcgtcgccaagcgttgttcgatttcatctaaccgggcttcatcccattccaacgaatccagttcatgattaagatcactgccacaatcctgcaacgtataataggccgtttgtaaactttcagcaatttgttggaaggctgtatctaacggtgcaatttcttgcatctgattcatcgcaatcgcaatctggtcaacggcgttaccttcctcacccgccaatatcatctggctggcttggagagcctgattaatccgttgaaagttcgctaatttcgttttttcttcgatcaattgggtctcttcgccggcttgtaattgtgccgcatcaatttcattggtttgaaattggagcatgtccaaacgttgcgcccattcctgttcattctgttgctttttcttcaacgcttgttgcgtctgccgataagcttgataggccacctgataggcttgtttggtctgcgcgattgattggtgggcaaattcatctaataagcccaagtgacggtcagggtgcattaactcttgatgttcattttgaccatgaatatcaactagggtttcaccgaccctttttaaagttgtcgtattgactaagcggccattaatccggcatacattatgcccattaacagcgatatcgcgttgcaataaaaccgtttgatcatcgtgttcgatgccaaattcggttaatacgtcggcggtcgtcccatttttggtcatcgtaaataagccttccaaagtggcctttttagcaccagttcgaatgaaatcttgcgaaccacgaccaccggccaataaaccaacggcatcgatgataatcgatttacccgcccctgtttcaccggacaacacggtcatgccttgatcaaaactaatggccaagtgatcaataattgcaaaatcatgaatgactaattcttgtaacatgccattggacccctttcgtcaatacgttaattggtaaaaaaacttgccaaattacttcagcaagttttcgataaagattgagaattcttgggcttgtacttctgatttacagattaccaacacggtgtcatcaccgccgattgtgccaaaaatcgcttctgcctgtaattgatctaatatattcgcaattgcggtcccgttaccgggcaacgctttaatcacgataaaatagtctttttgatgatgcgttaaatacgcttctttaaagagccggcgtaatttttctttaacatccatctttttttcaagcggcaggctgtaatgatagccttcatccgcattgggaactttaatcagttgcatttccttaatatcacgtgaaatcgtggcttgcgtcacgtcgattgattgcgcctgcaaaagtttgacaaaatcttcttggcgctcaatttcatgagtttgaatcaaattttttaacagtcgttgtcgctctactttacgcattaggaaacccctcttcatgtcgttgtttggatacttcacatgatagcgcatttatgcataaaatacaaagttttatacattattaattagaaggtcgttttaattcagtgtaggccgattctaggaccgcatcgatattgacagtcggtgctagttcaccgacttctttggtcgtattgcgtaaatggatcaagaattcaatattgccttcgccacctttaattggtgaaaaatcaagattcaacacatcataaccgttcgccaaactaaattcgacaatatccgtcacgacggccttatgcacctttggatcgcgcacaatgccgtgtttaccaacattggccggacctgcttcgaattgcggtttgattaaagcgaccgcttcacagttttcttttagaatcggttttagagggactagaattttgtgcaacgaaataaacgagacatcggtcatcgcaaaatcaggttgccccgctgtaaaatctgctggttgactgtaacggaagttgacccgttccatcacgactactttaggattttcacgcaatttccaggctaattgattataaccaacatccaatgcgtaacataattttgccccattacgcaacgcaacatcggtaaaaccacccgttgatgaaccaatatcaagcgtcaccttatcttgtaaatcaatgccgaaaacatcaacggctttagccaattttaaagcaccccgacccacgtacggaatcttacggcctttaacgtgtaaaatggcttcagcatcaattttttcgcctggtttgttgagccgttcatcatttttatcgtaaacttcaccagccatgaccgaccgtttagcttgttctctggattcgaatagtccttgttcgactaataacacatctacgcgttcttttttcatttgttctcctgttcgtcaaaataactcaaaaagctatttaataaggtttgatctaaaccgattaatgattgtaaggcttgttgggcctgttgacaagtctgctcaagttcagcctgcgcacccgccaaacccaataatcctgggaatgtatttttctgttcaatcgcatctttgtggaccgctttacccatcaccgctgccgtactagtcacatccaaaatatcatcttgaatttgaaaagccaaaccataatatttagcaaatgttaatagggctgctttttgaatcgggtttaaatccgccaatagcgcacccatctcaacggccgcttcaatcagacaaccggtttttaaatggtgtaattgtttcaattgggctaaccgtaattgcttagtttgaccttcaatatcttcaacctgtccagcaaccatcccattagcccccgccgcttgggcgagtatccggactaattgaacttgtttgtcggctggcaagttagtggtcgtcaaccaatcaaacgctaacgtcaataagccgtcgcccgctagaatggcttgggcctcaccaaaaactttatggttcgttggtcgtcctcgacgtaaatcgtcattatccatcgcgggtaagtcatcatgaatgagcgaataactatgcactaattccaacgcgcccgccacgcgcatcgcgttcaaatcaatcggcagcttcgcactctctaacacggcaaataataacaatggccgtagtcgtttgcccccggccatcactgaatattgcatcgccttttttaacgttggctcttccagttgatgcgctagcgcctgttctaaataagcttcgaactgtggtcgttgttgctgaccaaatgttgtaaaatcagtcatcactacttcgcctcagcatcaaaagcaacttcttcgccactatcggccatcactttcgccattgttttttcagccttcgttaaggtttcttctaaggtttggctgagcttaacccctttttgaaattcggtcattgccttttcaagtggcacatcgcccgtctctaattcagtcacaattgcttctaattgttgtaaattttcttcaaagcttagttttttttctgccatgattaaacgtctccttgatttgttttcgtaatttgcgcttcaactaacccgtcttggacgtgtaattgaatggcatgaccgatttcaaaatcggttgtcttttttaagacgtggtgttcttcatcagtcacatacgcaaaaccgcgacccaatacttttaacggactgactaaatccaagctcgcaatcgcttgattagcccgttgtcgctggttgaaccaattctgacgcgtggcgcgattcaagcgttgttgtaaatcagcgaccgtcgtttgtgtctgcgtcaccgttttaagcggtgaattgctgattaatcgctgttgttgtaattgccattgttggcgttggtttttcaataattgttgttgtgctaataataaccgtcgctttaattgatcaacgttttgtaaataaccatcgtacagtcgttgcggttgagtgagcacatagctaccttgtaggtgcgctaattgcttcttcaagagggctaactgttgggtgaacgcttgtgcgagtcgtagccgttgttgttgtaatttcaacaattcatcggtcaatacaggcgtcgccaattcggccgcagctgtcggcgttgcggctcgcacatcagcgactaaatcggcaatcgtcgtatcggtttcatggccgactgatgatatcacggggatttggctggcgacaattgcgcgtgccactcgttcttcattgaacggccataaatcttcaattgaaccaccaccccgaccgatgataatcgtatcgaattgacccagttgattaatctgttctaagcggctgactaaagtatccgccgccccatcgccttgcacaacggcggggaataacacaatttgtgcgattggataccgacggttagtcgttgtgataatatcgcgaatcacagctcccgagggactcgtaatcacggcaatgcgttttggaaagcggggaatcactttttttggtaattcaaaaagaccttccgtcgctaatttagccttcaattgttcataggcctgatagagtgcacccagaccatccggctccattcgttccacatagatttgatagttaccggtcgcttcatacagtgaaatccggcccactaccaagaccttcatgccttcttcaggggtaaactttagtttttcaaaagccgatttaaacatgattgcgctgattttagctttattatcttttaaactaaaatattgatgcgtatttggtcgcagacgaaaattggaaatttcacccgttaaataaacgcaatcaagatacggatcacgttcaaatttggcttttaaatactgcgttaatgctgtcaccgttaaataatcggttggtttaaccacgtttgacacgtcctttagcaatttcaatcgtttgggccatcaacatcgtgatggtcatcgggcccacaccgcggggaactggggtgatggcactcacttggtcttgaacggcttcgaaatcaacatcgccggtcaccgtcccgtcatccaaacgattcatgccgacatcgatcacgactgcgcccggtttaacgtcagccgcgccaaataaatgagcaacgccgaccgctgcgactaaaatatccgcggtcttcgttaaatcctgtaaatgcttcgttcgactatgcgcgattgtcaccgtggcgttggcgttgagcattaaagccgctaatggtcgtccaacaatattactgcgtccaacaatcacaacgttcttcccagccacgttaattttatgcgctgctagaatcgccatgacaccttggggggtacaagccactaagccgggttggttcatccacagtttaccgatgttgaccggactaaaaccgtccacatctttattcggatcaatcgtctggatgacacgatcttcgttaatttggggtggtaatgggagttggactaaaataccgtcaaccgtttgatcttggttgtaagcttcaacaacggctaataattcagcttccgttgtttcagccgacatctttttcaaaacagacgccatgccgattttagttgcacgtttttgtttattacgcgtataaatggcactcgccgggtcttcaccaaccataatcacaactagtttaggtgtcacgccttgttgtttcagcagatcaaccgccaatgtttgttcgtctgtcaattgatttgctaatgctctaccatctaataattccaatcttaacaacccctcatcacttatttgattattccattttagcataattcaagtcacaaaaatgatgttcgggtcatctttaatcaagctgttaaaaaacggacgccccattaaattgcctgcaaggaatgttacaaaaaagcctagtcaaaatgatgattgactaggcttagtgtcgctatttattttcaataaattttgataagacaccgttgatgaagcctttagcttggtcatcagtgaattgttttgctaattcaagcgcttcgttcaacgcaactttagaaggcgcttcggttgaattttgcatttcaaacaaaccaagtcggagaatgattaaatccggtttggccaatcgtgataattgccaccccttcttcagataaggcgttaaggcctcatctaaagccgcttgattttccgtcacaccggctactagaaaagttaaatagtcagggacagccactacttcaacttcttcagcgtcaaattggtccatcgtgaggaccgcttgggacgcttcttccgctgtcagtgtttgatttgcattcatcgcaaatagcacttgaaaagccgcttgacgaatctggtgtcgatttaaatttgacattaaatttggtctccatcttgatcaggtgtttcatcgctaaataagtcatctggatcaataatattttgtggtttttcggttacgacgccaacaacgtgtacattgacttcagctaattctaagtcggtcatgaacaaaagttgttctttcaaagcctcttgcatcgctaaggcgaccttcggaacggatacaccataatttaagtaaacataaacatccgcgttaactttaccttcaataacttttaatgtaacccctttgccgtgatttgaacgaccaaacagttcattaatcgatgatgataaggtcccacgcatttggtgcacaccttcaatttggccagccgcaattccaagaatcacttcaaccacttcaggtgccatttgaattttacctaatgaattttcttgcgcatcaagcacaatgtttgtctcttcagccatcaataaccctccaaacgaaaatcctaatcgctcgttatttttaaaacgaggtgcttaggcccgtgaaatataagtcccatcactagtgttaattgttaaagcatcgccttcgttaacgaagaatggcacttgaacgaccaaaccagtttccatagttgccggtttagtaccacccgaagaagtatcgccacggataccaggttcagttgcagctaccactaaatcaacggtctttggtaaatcaacccctaaggtttcactgccatgcatcatgattgagacttgcatattttctttcaagaattttaattcttcagtaatttgcgtttctggtaattctaattgttcataagtttcagtatccatgaacacgtagttatccccatcagcatatagatattgcattgattttgtatcgatgatcgctttttcaactttttcagttgaacggaatgtcttatcttggttagcaccggttcttaagttctttaacttagaacgaacaaaagcgccacccttacctggtttaacatgttggaattcaacaatccgccataagttattgtcaaattcgatcgttaagccattcttaaattcattaactgataacatatcttatcctccgtacttttttaaaagtatctcattaaactaatcatagcaagaaaacacgtctaaaagcaagtttttccgaagtaaacctgactttagcgggtatgtaaaaaagggttggcgattgccaaccctaagtgtcactaacgaaatagtccgctagccgtgagtaactcactgttagattgtcaatggatgattactataagtcactattataacagtaactcgcgcttaattcaaattgactcaccagagcctacccaacaaaaaaacacccacaaacgcgagtgttttatttgttttattatttagcttctgcagtatatactgaaacttttttcttgtttttaccgaagcgttcgaaacgaacgacaccttcgataagagcaaacaatgtatcatcgccaccgcgaccaacattttcaccgggatgaatcttagtaccgcgttggcggtataggattgaaccagcagtgacagtttgaccatcagcacgttttgaacctaaacgacgaccagctgagttacggccattggttgttgaaccgccacccttatggtgagagaagaattgtaaattcatttgtaacatcgaaatgcacctcctgcttattaactgttttgtttatttacgagtagtttgtacgtgaatgtactgtccgtattgttctgtgatatcctgtaacgttaattgcaaattctgtaacaaaatttgcgctgttgccaaagcttggccttcaaccgttgccggaatctgacagttcaacaaaccaccattgaggttatctgcttcaaccactggttcaaaaccagccaatttttgtaaactattaatcgtaccaatcgaaacagctgaaacagctgcacaaacgatatcacttccgtaaggacccgagtcggcatgacccgttatctgaaaagaaataatttgcgaatccgcattgacgacaaagtgagccttaatcatcttatttccctcaactaggcgttgatagcgtcgatcattactttagtatatggttgacgatggcccttcttttgatgactgtgtttcttaggcttgtatttgaaagtaacaactttcttttcacggccttgtttttcaacagtcccattgacagtagcgccgtcgatgtttggtgtcccaaccttagttgtttcgccgcccactaaaataacttgatcaaaagttactttttcgccagcttctgcggctaacttttcaacgtagatagcttgaccagcttctaccttatattgtttgccacctgttttgataattgcgtacatgtgtgcacctcctattttttcttagactcgccaactaaggtgcctacaaaaagtagtacttaatgccttagaatgcgcggttgcagctgtggagctcacaattacaacgttcatatgataccaaatatttgggacctagtcaatactttcttgggtttcaataaaaaattgtgctaaatcaaaatggacatttggcatttgaacgagttggtacaatatcttagccatataacgtggcgaatagaccaaaccgtcttcaatccatttgaagactaaaacgagactagcacccgctagatagtcggccgtgatgctcatttcaatttgatctgcttgtgaggcctctttaaattggacctcaatataagcttgtaataattggcgcatttcttgcgttaaacggtctttaaaggccagtgtcgcttcattctgatgaaagaccttaaacgtctgttgtttttgttcaacgtattcgaatagcgcttgtaaattaacctgatcacaagtcggtttagtcgtttgactaaaggttaccttctgatagaaatcatcaattaaatcttgaatggtcgcttgcataaaatcttgtttatcatcgtaatgtaaataaaaagtgccccgtgtgatgccagctaatttcgtcaccgtttgaatcgaaatcgttttaggtgtttctgttttcaacagggttactagcgcttgtcttaattgttgtttcgtcctttgcacccgtggatcttgggctgctgcgttcatttcacgaaccatttttaatcacctcaattgttagccaatatctgtcaatagtatagcttgtttatcaatttattgtccattaattggcccattttatgaatacaaacactactctacacgctaaatttgaagaaagtgtaactaaatgactaatatttattaataaaatggattgaggaccgatttaaattcatttgtcgtcgttgccttcttatagtagaatgaaggcagactttaatttcagacgatgttaggtggatactattttgattgcaacttttttaattatttttcttttgattgtattatttgcgacaattgcgagtcaattgacctttaaaattggcttagtcaccaattgcgtcttatttattattttggttggcgtggacgcttatctattcagctggtcgagcggcctccattggacctatttcattatcagtttgctagcgctaatcgccagtgaactcttattagcggaattcccccacgttaacgactaatttattaatttccattcaaattcaaaaagcagtttatccttcagtgtcgggataaactgcttttttacttgatacgcaattgataacgtgcttctcagccaacttcttccgtctagctacgaatcgcaaattacgactaaaaccagtcataatacgcaattctaggctatactcagaagctaatcggatgagtcagcacttaaatcataacgtgcccctgccaaggacctttagtatagcatagttcgaccattttaggtcaaagcttgatgaccaatatcctgacggtagaaggttcccggttgggctaaagcttttaaatcagcataaacttgttgtctggcggttggtaggtcgattgccgtcacgaccgctgtcaacaggcgtccgcccgtgccaatcaattgatcttgcgtaccggccacgccggcaaaactaaattggctcgtcgctgcttgaaattgtgacgttggggctaattcaaccggcacggtcgcctcagtcggatacccctcagctgcgacaaccaccccgagagtcatcccgtcagtttgccacgttaaagttggtgttttgtggctcaccaattgttcaaacacttgggcccagtcgccagtcatccgtggtaaaacaacttgggtttctggatcaccgaaacggacgttaaactcaattaccttaacgcccgctttcgtggcaatcagccccgcgtataagacacccgtaaaaggcgtaccgacatccgccatcgcagcgacgacgggttgcaaaatttggtccacagtttcttgaacaaccgcggcactaacctgcggcacgggacaataagcccccattccaccggtattcggcccaagatcgccttcaaaggcccgtttgtggtcttgcgcgaccggtagtgggtaaacttgtccatcggcgactaacgccatcagtgagaactcctcgccgcttaaatagtcttccattaaaatgctcgtcacaccttgttcaaagaagcgttcaatcgtagtcgttgcgaccgccaaatccggtgcgatcaccacgcctttgccggctgccaagccatccgctttaatcacgactggataattttgcgctgctaaggcggctaaagccggtgtcaccgtcgtaaaagtttgataaccagcagtcggcacttgcgctttagccattatttccttggcaaacgtcttcgaaccttcaagagcagcggcggctttcgttggcccaaaaatcgtgagcccggccgtttgaaaggcatcgacaatcccggcgactaacggttgttccggtccaacaattgtgtagctaatcgcattttgttgtgcaaaatcaatcatccctgcaaaatcggttagttcaacggccacggtttgaatcgcatccaaggtcattcccggattgccgggtagacaataaaccgtttcaacccgctgactttgcgccaattctctggccaatacgtgttcccgcgcaccgctaccaatcaccaaaattttcatcgtcttccgtcctttttgattaatgtttgaaatgacgccggcctgtgaagaccatgctgacccctttttgattggccatgtcgattgaatcttgatccttaattgaaccgcctggttgaataatcgcggtaatgccgtgttcagccgcaaattcaacactatcattcattgggaaatacgcgtcagatgctaaaacaaacggcgtggttaaaccattggctaacgcttgttctaacgcaattttgaccgaaccgactcggttcatttggcccgcaccaatccctaaggtttggtccttagtggcaatcacgatggcgttactcttgacgtgtttaacaatccgttgagcaaagagcatcgccgctttttcgtcttctgttggggctttagttgtgaccgtttctaattcgctcatttgatcgaccacttgatcgcgttcttgaacgagtaacccacccatgaccgaaaccgtttcgaagcgatcagcctctttgacttgatcgaaatcaagggtcatcacgcgcagattctttttcttttctaaaatcgctaacgcttcatctgaataactaggcgcaataatgatttctaaaaatagtttgtggagttccgtggcagtttgcgcatcgacttcacgatttaaggcgataatcccaccaaaaatcgaggttgaatcggctgcgtaagctttttgccaagcggcgtaaatcgtcatgcctaaaccaacgccacacggattcatgtgtttcatcgcaacgacacatggttcgctaaattcagcagcgactttgaccgcggcatcggcatctttaatgttattgtatgacaattccttaccatgcaattgttgcgcactggcaatcgagaaagcacttggtaaccccgcttggtagaaagcggctttttgatgggcgttttcgccataacggagcgcttgtttgaagtcataagtccgcgttaatttttcaggaaattcaattccaacggcttgggttaaataatcagcgattaaactatcataagcagccgtatgccggaatgcctttgcggctaagtaacgacggtaatctaattcatcttcgctagattgaacatggtctaaaacagcggcgtagtcttgttgatcgacgacaacatacacggattgaaagtttttagaagcggaacgcaacattgaaggcccgccaatatcgatttgttcaaccgcttcgggttcagtgattcccgctttttgaatcgtttctttaaacggatagagattgacacaaactaaatcaattggcgtgatatcgtgttcagccaaaacggccatatggtcaggattatcccgtttggctaacaaaccaccgtgaatgttgggatgtagggttttaacccgaccgtcaagcatttctggaaaatgagtgacttcatcaatggcaatcactggtacttgggattcggctagtttctttaaagtcccacccgtcgaaatcacctcataaccggctgcgactagtccttgtgcgaattcaacgattcctgttttatctgaaacactaattaacgctctcttcatctgctcgaatgctcctttgaatttgatttaatcaacgtttgaatcacttctggatataattgatgttccgtggcatgaatccgggtttcaagagccaccaacgactctccagcacgtaatggcaccaccgcttgcgcgataatcggtccactgtcgacaccctcatcgatgtaatgaatcgtgacgccggtttcggtaacctgcgcttgatacgcttcttcaatactatgaatcccggggaaagccggcaacaacgccggatgaatattaataatccgttgcggatacgcctttaacaagacaggcgtaataatccgcatataacccgccaataaaatgtaatcaaccgctaatggcgctaattgatcaacaatcgcttgttcgtaaacttgccggctggcaaactgtttaggtcgtaaaaccgtcactggaatttcgcgatcctgggctttgacaattaccggcgcgctgggttggtcacaaacgagctgaacaatttctaatccggcagatttcaaacccgcatgatcggcaatcgcttcaaaattcgaaccggtccctgaagcaaaaatggcgactttcatctaacgacccaccaattcaactgcattttgttgtcgcgtttgaaccgtcccaatttggaaagcttgggtctgcgcttgattcaattcggctaagacggttgccgcttggtccggtgcaaccgctaagaccatgccaatccccatattgaagatgttatacatttcaagttcgtccaattgaccgtattgcgctaacgctttaaaaatcggtagcactggccaactgtctaattcaatcacggccgccactgcttcaggtaacatccgggggacgttttcgataaagccgccgccggtaatatgagcagcgcctttaattaaatgctttttgagcaagggttgcatggcctcaacgtaaatctgagtcggtgttaataagacttcacctagggtttgacctggtaattctggtaattggctatcaaccgtcaattgattttgttcaaagaaaatttgccgcaccagtgaaaagccgtttgaatgtaatccgctagacgcaatcccaatcaacacatcgccagcttgaatatcgtctccggttaataagtcggcttgttcaccaatcccaaccgcaaaaccagctaaatcgtaatgtttttcagcgtacatccccggcatttcagccgtttcgccaccgactaaagccatttgcccctgttggcaacccgtcacaaccccttgaatgatctgttcgatcttatcggggttggtttgaccggccgctaaataatctaagaaatacaacggttgggccccttgagcgacaatgtcgttgacgcacatcgcgacacaatcaattccgatagttgtatgttgatcggcctcaaaagcgaccatcaacttggtaccaaccccatccgtactggagaccaatactggtgattgatattgagttaacgctaaggcaaactgaccgccaaaacgaccaatgttaccatcgtcagttttgagttgtttttgaatccggcgggtgacttcataaccggctgttacgtcgaccccggctttttgataagcatttgtcatttaggttactccttgtctgcatttagactcgcttgataatttgcggcataatcataaagtggcgttggataatcaccattaaagtaggccatacataagcctgtataaggcgcatccttgttaagaccaattgcatcaattaatccttgttggcttaaaaaggccaatgaatcggcaccaatcgtctcgcacatttcggcgacactttggtgagcggcaatcaattcttcgcgggtttgaatatcaatcccgtaaaagcacgggtatttcaacggtggcgaagcaattcgtaaatgaacttctagcgcaccggccgcctttaaccgtttgacaatgtgtttgctggttgtaccacgaacgattgaatcatcgactaaaatcacccgtttgccagccaccacacttttaacggcggctaacttacgattgacgccttgttcacgcagggcctgcgttggttggataaaggtccgaccaacgtattgattcttcaccaaccccatttcatacggtaattggctggcttcagcataaccgctagccgccgataatgaagagttcggcaccccaatcaccatatccgcttcaaccggcgcttcttgtgctaaccgctgacccattcgtttacgggcagtatgcacgttgacaccgcagatgtcggaatcaggtcgggcaaaatagatatattccatcgaacaaattgataaggttgtgtcagttgtaaagaaatcggaatgaagcccttcgtcatcgatggtcacaatttcgcccggttgaacatcgcgaataaaagtcgcttccaccgcgtttaacgcacacgtttcactagcaacgacgtaagccccattttgcatctgaccaatcgataacggccggaaaccattcggatccaacatggcaatcatcgaatcttgggtcagcaataagtaagcaaagccaccgtgaatctgttgtaaggcgcgtttaatttgttgatgtaaatcaggacctggcgcccggcgaatcaaatgcatcaaaatttcagaatcagaacttgatttcaaaattgatccagccgcttctaattcccgccgcaaactgaccgcattggttaaattgccgttatgcgctaatgcgaattgaccatccgcaaaatcaaacaagaacggttgaatgttttctaggccgtgactgccggccgttgcatagcgcacatgaccaatcgcgtctaacccggttaattgcgccagattttctggatttcgaaagacatcggccaacaaaccgcgatcgcggtacccttttaaccgaccgcgatcattggtcacaatcccggcgccttcttgaccccggtgttgcaaactatgcaaaccaaagtatgtcagctgattggcatcgggatgaccccaaacgccaaagatgccacattcttcatttaaactctttatttcattaggcatggaatggccgccttccaagctgatttagccgtttcaaccgctaatgtcagactttcatctttggtttgaattgtcatttgaccgttatcagtcacacagccaatcaactgcgctgccgaacctgctaccgtttcaaaggccgcttgttgatccggtttaaccgttaaaataaagcgtgattgggtttcggagaataattgtgcactggttaaatcgacttgcacggcgtaacccaactgatttttaaaggtcgcttccgctaatgcaatcgcgagcccgccctctgctaaatcatgggcactggtgattaaaccggcttgaatcgcgtttaaaaccaggtcttgattgtgggcttcagtcgttaatgagaaggcacccagttgaccgctgatgctgcccgttaacattttttgcaattcactaccggcatagtcgtcatcggtgtcaccaactaagtaaatcagatcatcggttgctttaaaatcttgagtcgtgatgtggtcggtgtctttaatcaacccgaccatcccaatcatcggcgttggataaatcgcttcgccgttaaattcgttataaagtgagacgtttcctgaaatgaccggggtgccaaactgacgacacgcttctgcaatcccttgtgcactttgatcgaattcccagaaaacttctggtttttcaggactcccataatttaaacaatcggtaatcccgagcggttgcccaccagctgcgacgatgttccgggccgcttcagcaacggcaatttgaccgccaactttcggattcaaatagagatagcgaccattacaatcggtggtcatcgctaacgcttttttagtcccacgcacccgaatcaccgcagcgtcactaccgggtaaaacaaccgtattggttttaacttgggcatcataatgtttgtagaatgaactcttatccgcaattgtgggttgttttaacaaatccaaccaagtttgtttcgtatctgtcaattctggttgataagcggcttgttgttcaaaatcgattaagcgttgtggtttagcttgtgctttatggtaaaccggtgcagaactagcgagcgcatcgaccggtaagtcagccactagttggccttgatgccagagttggtattgttgggccgtcgtaacttcaccaatccgaacggcatctaaatcatattttttgaaaagggtgatgacttgttcttcaaagcccgctttcacacagagtgccatccgttcttgtgattcggacaacataatttcgtaagccgacatttctgtctcgcgttgtggcacttgatcgaggtctaaaatcataccggtcccagctttcgaagccatttcagcggttgatgagaccaaaccagcagcgcccatgtcttgaattccaactaaccaatccggatgatctaaaattaattccaaacaggcatccatcaatagtttttccataaatggatcgccgacttgcaccgcggaacgttgtgtcgctttaccatccgcaaattcatcagaggcaaaagtggccccatgaatcccatcacgaccggttttagcaccgacatataagacactgttaccagcgccttgggctttgccttgttgaatatctttttgatcaatcaaaccgacacacatggcgttgaccaacgggttggcttgataacaaggatcaaattcaatttcgccgccgaccgttggaatcccgatacaattgccgtaaccggcaatcccagcgaccacttcttggactaagtatttcgtttgattatcgtttaattcgccaaagcggaggctatccaaaatcgcaatcggcgtcgcacccatcgaaaagatatcgcggatgatgccaccaaccccagtcgctgcgccttcatacggttcaacagccgacggatggttatgactttcggctttaaaaacaaccgcttgaccgtcaccgatgtctaaaataccggcgccttcaccaggcccttgtaagacgtggggaccatcattggggaattttttcaaaacgggtttcgaattcttataagaacaatgttcactccacatcaccgaaaacaagccggtttcggtgtaattcggtaaacgattcaagatttgatcacaaattaattgatattcactatccaataaaccccattcttgataaagcttggtcgtttggatttcatttggtgttggcatggtcatcatacttggctcacccctttaaaagtcgttaaaattgatttaaacacgtttaacccatcggtactacctaataaagcttcaaccgcccgttcgggatggggcatcatgcctaagacattgccttgttgattggtgatgccggcaatgttggccaaactcccattgacgtcttcttgatacgtaaacgcaatttgctgattggcttttaatgtagccaaggtttgggcgtcacaatagtaattgccttcaccgtgcgcaattggcaacgcaatttgggcgccatttgcatattgattggtaaacatcgtttgattgttggtcacttggagtgcgaccgtatcgcataggaaatgagtttgccgattgggcattaacgttcctggcaataatccggcttcagttaaaatttggaaaccgttgcaaattcctaaaactggtttgcccgcttccgcaaattcaataacggctgccatgatcggtgctagtttggcaatcgcgccactccgtaaataatcaccgtatgaaaaaccacctgggattaaaacagcgtcaaaaccagctaaactggttgccgtataaggcacataagctgcttcttcgtgacacgcatcaacaatcgcgtggtataaatcggcatcacaattagaacccggaaacaccaagacggcaaatttcattattcagcctccatactttgaatgtcataccgatattgttccatgttggggttggctaataattgatcacagatggcttccactttttcagtgacggcggcttgatcactaccagcaacttgcatctcgaagaatttaccaatccgcatatgatcgacgccttcaaaacctaaacgagcaacggccccttgaacggcttggccttgtggatcgagtactgaatctttataagtgacgtgtacttgaacgttatacatgttgttgtcctccaattgtttggtctaagcgttgtaatacttcttgataaaccgtcactaaatcgccttgattttgacggaaaacatctttatcgagcgatgcgtgactcttttgatcccacaagcgacaattatccggtgaaaattcatccgctaaaatcaagcggccccgataacgaccaaattctaatttgaaatcaaccagatcaatcccaatttgattaaacaactcagttagtaattgattaaccgtgttggtcatcgcttcaatcgtttgaatctcagctaaactgaccagtttcaaagccgtggcttgtgagatattaatcgcaggatcatccagcgcatcgtttttgaaatagtattcaataatcggggtctgtaaggtttgaccgacccgttgcccaaacttacgggcgaaactgccagctacaacgttgcgtaaaacgacttctaacgggataatctcaacttttttaacgagttgttcggtttctgataaattttgaaccaaatgggtttcaattcccttttgttttaaataatcaaaaattaaattcgaaatctgatggttaacgcgacccttgccgacaatctgttctttacgtttgccgtttaacgcagtcgcctgatctttatagaccatttttaaaatttccggattatcagtcgtcatcaaatccttcgctttacctgaataaatgagttcgttagtcatctttctcctccaattagcggacaatatccgtcgtattataataattgttcgtttcacttttttgtgtaaaaaaactttgaaaacacagtggatttcaaagttttaatggtctataaaccgacccgttcaaaaatttcgtcaacgcggcgaatgtggtaatgataatcaaaggcgtcatctaaatcagcagttgatagaacagtcataattttaggatccgcctctaacaatggtctgaaatcaatttgttcgtcccatgattgagccgtcttcggttgaatcaaatcgtacgctgcttcgcgggataacccttgatcaatcaacttcagcaacactcgttggctataaatcaaaccgaatgtccggcccatattacgtttcatattttcggggaaaacagttaattctccgataatttttgtgaatcgttttaagatataatcgagtaaaatcgtcgtatccggtaaaataatccgttcggctgagctgtgggaaatatcccgttcgtgccagagagtgacgtcttcataagccgtcaccatatggccgcggatcacccgagtcaagcccgtgatgttttcggaaccaatcggattccgtttatgcggcatggctgaagaccctttttggcctttggcgaaatgttcttcgacttcacgggtttctgatttttgtaatccgcgaatttcagtcgcaaatttttcaatcgaagttgctaacaaagccatttcagcgacatacgctgcgtgtaaatcacgcggtaggacttgcgttgaaatttcttgggcccgaatcccaaggtgttcacagacgtaggcttcgacaaatggtggaatattggcaaacgtgccgactgccccactgattttaccagcttcaacacctttagccgcttcgtcaaaacgcgctttgtgccgttttaattctgaataccacaatgctaattttaaaccgaacgttgtcggttcagcgtggaccccatgtgtccggcccatcatgaccgtctttttataacgaactgcttgtttcgcaacgaccgccatcaattcatcaatgtcggctcgcaaaatagcgttggcttgtttcaataaatgaccgtaagccgtatcgaccacgtctgttgaagttaaaccgtaatgaacccatttacgttctgcgcctaatgattccgaaacggtccgcgtgaatgcgacaacatcgtgacgggttgtttgttcaatttctagaatacgggggactgaaaaactcgcattagcgcgaatcttggcggcatcttcagccggaatatggcccaattcggcccaagcttcatcggctagaatttcaacatccaaccacgcttgatatttattttcgtcagtccagattgcacccatttcgggattcgtataacgttcaatcatgttgttgagctcctttagttagtcccaaatttgggtcgctttaatttgtgctagggttgtttcaggttgatccgttaaaatcgtgatgtgacccatcttacgattaagcttgcgttcagctttcccgtaatcgtgataatgccaagtggcttgttgttggctgactttaagggcttctgcaacatcttggcccaaaacgttcaccataattgcgggttgccattgttgtggggttgctagcggccaattacaaacaccacgaacgtgcgtggcaaattgggaccagtcacaagcttcaatcgttagatgccccgagttatggggtctgggtgcaatttcgttgacgtacaattcaccttgcgctgtaacgaaaaattcaatgcctaacgtccccaccaattcaatctcggtcgcaatcttagtggcaatggcttgcgcctgctgagctaacgcacgtgtaatgcgagcgggactgatgctgatatgtagaatattatgccgatgttgattttcaatcaccgggaaaacactctgttgtccgtcccaattctgactaatcattactgaaatttcgcggttaaaatcaaccatcgcttccaatacacaaggtccagattgcaataacggtgtcgcttttgctaaatcaaccgctctgtttaaaaccaactgtcccttaccatcgtagccaccacgcgtcgtttttaaaatcgccggcaacccaatcttggctaccgcggttgttaattcaacttcggtcgtaaccacttcaaaagcagcgtgcggcaattcttgtgcggctaaaaattgtttttctaaaacccgatcctgtgaaatccgtaaagcttttgtcccctgtggaaattgactgaacgcttgcgccttttcgatggttgccgcgtcaacgttttcgaattcgtatgtcacaacatcacttttttgtgctaattcaataatttgtgcttcgctatcataagccgcaatgatctgaccgtcagcgacttgcccagccggacaatccgcttgtgggtctagaatcaaaacccgatagcccattgatttagccgccatcgtcatcatttgacctaactgtccgccaccaatgatgccaatcgtttcacccggcataatggctggtttagttgagttgttcattactggccaccgccttttgatgaagcgtttgttggtaagttgtcaaagcggtttgataagccggtatttgcaacccacatatttgtgtcgctaagatgcccgcgttaacggcacccgcctgaccaatcgcgaccgttgcaacgggtacgccgctcggcatttggacaatcgataataacgaatccatcccatttagggctttgctttgaatgggcacaccaatgaccggcaagactgtattcgccgctagcattccaggtaaatgagccgcaccacccgcacccgcaataatcacgcgataaccattagtttgtgcctgttgcgcaaaggcaaccatctccatcggcatccggtgggctgaaataatctgtgtctcgtaactaactcctaattcagtcaacatatccgctgtcgctttcatggttgaccaatccgaaatcgaccccattacaatcgctacatccgtcattcaatctgcccgctttcttatctatattatgctttgattttaacaagcaaatttggatatgtcaaagcaaataccgaattattagttaattttaatattaattgtacgtaaattacgaacgttaagcttttacggatggaaaatcaccttctttaagaataaaaatgcgaatatcaaaaaagcgactatccttagttctggataatcgctttttcaacttgtgtgagcactcaaatcataacgctgatttctaggttaatcctcaaagcctaaccaacttgagttagcactcacttatttaaggtaacatcacgaagcatagtgcgcctaagataccaccgataattgggccaacgactggaatccaagcgtatgaccaatccgaatcacctttattggcaattggtaagaccgcatgcgcaatccgtgggcccaagtcccgagctggattaatcgcgtaaccggtcgtcccaccgagtgataagccgatagccgtgataatgacgcccacgaccaatgggtttaacccatcagtgaattgaccacgtgtcaaagccaataatgagaagatcaagacaaatgtcccgattaattcactcatcatgttggcaaacggactgcgaatggcaggcccggttgcaaaagtccctagaattgcggcttgatccttagtcgctgcccagtgtggatagtattgaatccagacgacaaccgctcctaagaacgccccaatcatttgggcgatgataaatggcaagaccgccgcccaaggtgttttgccgatgattgcaaaagcaacggtcacggctggatttaaatgagctggtcccataaaggatgatgcgtacaccccgagtgtgactgcgaatccccaaccaagggtaattgcaatccaacccgcaccgttcgctttggtttttgctaaactaacgccagcaacgaccccgtcacccaagagtactaagataaatgtgccgacgagttcgcctagcgcttgaaccataattgaattatccatcagttttcctcccagttaattgactattttaaataatcaagttgtgcttcagcaattgcagcgtctaattgtgctgtttgtgctgctttttcagtggcatcccagtttaataacttagccatttcatcaatcactggttgtttaatcgctactaattgatcattgtggaataggacaaagttagtccgacgtaataaataatcgaccggtgttaaggtcatttcttcgttgactgagtaacgtaaactgattgtttctttcaagtttaacccttcagcaaccccttgatccgcgtatgaaaccacgcgactaacgtttgaaccaaagcggttagctaaatcacgcgcatcgtcttcagcaatccctttgttgatggctacttgtgcatagaatttcaatgtgtcgtcaacgttattcggatcaaaatgaccccctgagacttgtaatttcttagaatcaacttcacgaacttgttccttaaaatcagtcttcaaagtttcacgaattaaatcaagcgcaccggctgccatcttacggtagtcagtaattttaccacctgatagggttaataagccattttcagcagtcttcaaatcactcccacgagaaacttgtgacggattagtggtttcttcagcatgggcggtcttcaattgactgattgccttttcaacatcaccgcgtacggctgttttattttcaaagttattgacggtgtcgattaaatgattaaatgattcttcggaaactttaccggcattcgcaccaccaccgttataatcggaacttccgttattggcgatcaatggtcgtaaaccagcccagcttgcttcaatatcagctaacttaatttggacgtttggataacgattattaacagctttcaataggtaatcaacatccagttgttcaacgcgtgggtgtttgtaatcgcccgtataatccgtatcagttgtcccaaaataagttttgccttcgcgtgggaccacgaaaatcatccgaccatcatgtaatccagaatcaaaatacgttggttgtggcactggtaaacgactgtcatcaacaactaaatgaatccctttagttggacgcagtgtttcgtgttttggtgctttggtatttaaagcgttgaccttatccacccaaggaccggccgtattaatcactaatttagcgttaatcttgaacgtttcatcagttaattcatcatgcgcttccaaaccattaactcggccttgtgcgtcataagtcatgccaaccgctttaacgtggctagcaacgtgtgcgcctaattcatccgcttctttaatgttttcgatgactaaacgggcatcgttgttgacgaaatcaagatacacaccggcaccctttaatttgtcagctttcaagccaggttctctttgtaaaacttcattgtgatcgatggtgtaattggcatattgggtcccagtcacaccagctaattgatcataaagatccatcgcaattttgacactaaacatatcatacgttgcttctggttcgtcatagattggtaataacattggtgtaggccgtggaatatgaggtgcaatcccttgaactaccgctcgttcactaacggtatcagccacaacgccaacatcgaaagtcttcaaataacgaatcccaccatgcactaacttcgttgagcgagatgacgtcccttcagcaaaatcttgcatttcaatcaaaccggttttaatgcctgaagcagcggcttgaatcgctacaccagcacccgtaatcccaccaccgataattaatagatccaatggttcattctttaaatcttgaattgtttgttgccgtgatgtttttgaaaatgtcataataatcctcctcattcacgcatcttatatgggcgatgtttgaaaactttagttgcttcaactgcttgttgccaaccagcgtataaatcttcacgttcttcttcaggcattgctggttcaaaccgttgcccaactgtgaaaatctgggccaattcgtctgtatcttgccagaaaccaactgctagtcctgctaagaaagcagcacccatcgcggttgtttctaagttgcccgctttttcgattgtgctgtttaaaatatcagcttggaactgcatcaaataattattattggcagcgccaccatctacacgcaacgttttaatatcaataccagtatctttttgcatcgtcgaaacgacatctcgtgtttgataggctaatgattgcagtgttgctttaataatatcttgtcgattggtcccacgagtaatgccgagaatcgatccccgtgcttctgaatcccaatatggagcccctaaaccggtaaatgctggtacgacgtaaacttcattcaaactagttgatgccttagcggccgcttctgaatccgatgatttttcaacgagctgcatactatcgcgcaaccattgaatcgcagaccctgcgacgaaaactgaaccttctagggcgtaattaactttcccgttgattgaataaccaatcgtcgtcaataaattattctctgacatcgttggttcttcaccggtattcatcacgataaatgacccggtcccgtaagtattcttaaccatccctggttggagtgctagttggccgaataaggctgcttgttgatccccagccatcccggcgattggcaccgtgctaccgtaaaaatggtaaggtgccgtttgaccgtaaatctccgagttagaacgcacatctggtaacattttccgtggaatgttcaacaattcaagaatatcgtcatcccagtcgaggtcatggatgttaaaaagcatcgtccgactcgcattggtgtaatcagtgacgtgtgatgcgccaccggttaacttccaagcaatccaagtatcaatcgtcccgaataataattcaccgttttcggcccgttcttgcgcaccggggacgtggtctaaaatccaacgaatcttagtggctgagaaatacgcatcgacgattaaccccgtcttttgatggagcatctcgccataaccatccgcctttaattgatctgcaatgtcgctggtttgtcgtgattgccaaaccaccgcgttatagatgggtaaccctgtttctttatcccaaaccaccgctgtttcacgttgattggtaatgccgatccccgcaatttgatggggttggatactagatgaaatgaatgcattggcaattgtcgataaaacggcattccaaatttcattagcgttatgttcaacccaacctggttctgggaaatactgtgggaattcacgctgagcatctgcgactttttgacctttatgatcaaaaataatcgaacgggtactcgtcgtgccttcatcaatggctaaaatatactgttcagtcattttaatcctcctttatctaaaaagattagaaaacgtttccttgagacgtattatagattattattgtccaaaatgaaagcgtttagctaaattaaattttacacaattaaataacttcgccaataaatgatagtcgtaactatcggtagccttcacgatgctaattataccacgagtttagtgtagagatccccattgatccttcctaatgaaattgacgaatttttaacattttgacataaaataatataaattcgacccccgtggctaaagccgttcgaaatactccatcccgataaataaccgcggttaacgattaatgccggatcgttataaaaacccataccgtaatgggattgactgcctggtttgaacatcaaattggtactcgcctcagtcaataggtggtgtgtaaacagcgcttgatcaaaccggtataaatccgtcgcggtcatgtagagatccccaaccccgtataattgggaaaaattaggtaagacgcccgccttcaattgattgttcaccatttcgtaaccgaccgatgctgcggttaattggccgtacttagtcgtcataaaatcagccgtcatcatttgactcggcttaaaaatatgttgtttaaggtacgtttgataggattggtggctgacctgttctaaaattttggtcagaacaatgtaattcgcatccaaataatgccactgccccggctgtccctgaatcccgttagcgataatttcttgcaataattgttgactggtcttcgtttgattatcctgattgcgccccacaattcctgaagtatggtgcattaaatcggccaacgtcatttgctgaccattggggaaatcgggcaaatatttggcaaccggatcattgacggctaatcggtgtttttcttgtaattgcaaaataccggtggcgatcatcgccttctcagttgaaccgattggatacaacgtattgggatcattgacctgttgcgtcgtttgattagcgagtccgtagcctttgttcaggatgaccttttgatctttgacgattaaaacggtccccgaaaaacctaggtttttaaaataatcgtctagtgccggatcctgattaatcgttggctgtttacgcgtctcagttggcgttgtcttagtcttggtcttggtcttggtcttagtcttggtcttggtcttagtcttagtcttggtcttggtcttagtcttggtcttagtcttggtcttagtcttggtcttagtcttggtcttggtcttagtcttggtcttggtcttactcgaccgtttttcactagcttgtcgccgactactatgactcgtcacttgcgatttagccgtcgtctgccgttgggcaatccccacaattccgtaaagaataatgccgacacctacgattgcaatcagccacttacctaaccctttaatcatttgccattctcctctatctaacctacgattacttgtttattttcaatgtacaacatcgttagagcgattagaagtgacagtattgttagacccattcaaaaaagttgctggtcatcaacatgactagcaacttttaacaccgttatttaactaatagtacgttggctttagcgtggacactgacgtattgcgccactgaccccattaacatccgttcaatggcgcccttcccagtgatccctaacataatcaaatcaatatcatattcttccggaattcgaatcgcaatttctttgcgtggcgaggccaccgtcataatcggcgtgatattttctaacccgtggttatgggcatagcggacactggctgctaattgttctttcacgcgatctttttccatcgcagtgacttttgcgtagacgctagcatcgggtgaaacaaacgtattattcgggataatatgggctacaaatagttcggcttggtttcgtttagccacttccaccgcttcagtaaacgccttttgtgataattcggagccatcgacccccactagaattctttggtatctttctgtcattactcatcatccttccattaattgtgacgcaagcgcttagtaaacaaactcacataacgcccgctagttactgcctacttctattataaagaattgcctcgtttgaccacaactaatacgcccacttaattaattaagctaaaagcgttgacattatctaatcaacaccctatactaactaaaggaatttcgctatcattttgattaggacctttccgaacttttgagaaaggagatttaaccatgacatttgataataatggtactcaataccgagtattacttgatacgaacgaaaatttatttatcgtttccggtttaacagctggacaagaagcaaccggcgcaacgattgaagaagctttacagaaatttgaatccattctataaagaataaggagcattatattctatgagcgaagtatcgtatccgtaggcattcactaagttaaattagcgaatgcctattttgttgcacttaaccataaaaaagacacgcacttttagcaagtactcgcatgtcttctgataaccgtaatacataactcaccgagcaccgataacaaccagaacaccaagctgatcatcgtcagctcccctttatggtcaatttaacgattaattatttaattgaataccctttcacaaaaattaaaccaaaataaaaacaccagcatcaagaatcccttgataccggtgtttattagtgccgcagatgagattcgaactcatgacctacggtttagaagaccgttgctctatccagctgagctactgcgacatttttttaatagatattgctgtcagaaacttgcacaacatgctatattataagcaattgaaggcactgctgtcaattgaaatccgtagaattgaggtaaaaaagatgaaattaaatcaatttggacgtctcacgatgccgattccggcacaaatcacggaattaaagcggatacagcttttaccagctgatttcgccgatgattcgctatcagcattagcaaccactatttttagccgcttcttcccagaagcccattcgaaaaccagtcaacatgaagtcctcggtcagattcaagccacggctaaactcgacttagctgcttatttgtcgagtatcacaacgactattgatcaacggacgttttataacgtcgcactccagttattggggtttgaagttgagcaagatttcaagctcaatcatccccggcgttttatggcctcggtcaagattccttacatcgatcagcccacttttaatcgtgaccaatttcttgaagccatttatttgttattaaacacccgcagtcaaaccggtttattattgattgatcaactcgctaatcgcggttttttcacggattggcaggccaccgatcaacctaatttcttaattttcaatggtaaaacccaacccgtttttgatacccaagccttcattaaggaaatcgtctatgtcgaatcgtcacttgataccgatttagatggtcatcgcgatctattggaaacgaccatttttagacccgttgaaaccaatcacggcttgaaagtccccgcgttatatactgccagtccttattacaaaggcatcaataatgttgatcatgatttacacaacgtcgatgggccaattgacgctaaggaaactagtcaaccaaccttaaccgctttaaagacaacagagacgcgcagtgatctcccagctgcccgtcaagttaacggccagaccgaaaccgctgaggtcacagcaacgagtgatagttcttattcactcaacgattacttccttgcgcgcggttttgcaactatttatgcgggtggcattggtactcgtggttcagatggcgtccggacttgtggatcaccagcagaaactgaatcaacaacggcgattattgaatggttagctggtaatcggcgcgccttcaccaaccggaccgaccaaattgaaattaaagcttggtggtgcaaccacaacgtcgcgatgactggtaagtcctacctcgggacgttagcaaccgccgcggccaccactggcgtagcgggtttaaagaccattatctctgaagcagcgatttcgagttggtacgattattatcgtgaaaatggcttggtcgtcgcgcccgttgattgtcagggtgaagatgctgacgttttagcgaaactctgtcaaacccgtcaaaaagatgcagctgattacgccaaatctggggcctttttccaacaacagatggctgatttacaacttggccaagaccggattaccggtaactacaacgccttttgggctgaacgaaactatcgcgacaacatcgaaaacgtgacttgtgatgtcgtcattgtccacggtttaaacgattggaacgttaaaccccaaaatgcgggcgctttgtgggatgctttgcgcacccgacccgttgaaaagaaagtctttttacaccaaggaccccacgtctacatgaacaatatccaatcgattgatttcaccgatatgatgaacctctggttaaccaaccatctattggacgtcgacaatcaagcggccgccattttaccgaacgtcgtcattcaagacaacgcgcaagaaagcacttggcaaacccaagaagattggctcaatcctgataattcgcaaaccacttattatttaaacagtcccgaaacgctaagtctgacccaaccggctaaagcccccgttgcaacctttatcgatgacggcgtagccactttcaagaccagtcatctcagtgaacatgcttggcaagaccaactcttgcaaccccaatcagcctttgccaataatcgtttattattgcaatcacccgcattgacacaggcctaccgtttggatggccgtgttcaattcaatactaaagtcgccgttaacgccaatcacggcctgctgagcgtcatgttagtcgatttaggggtctttagtcgtctaaatcctcaaccaactgtcataagcgctcagggccaacaattaggctatcgctggcaattcgatgatttaaaagaatttaagctcggtgctttaagcgattatcaagtgatcaccaagggccacatcaatttgcaaaatcgtcaaaacagttatcaaactgaaacggtcacacccggtgaattctatccaatcacacttgatttacaacccacccattatcatttactaccgggtcaccaactcggattagtcgtgtacgccactgatatggggatgactttacgcgaagaacaagccacacaataccgaatcgatttaagcgctagtcggttaacgattcccaacctcaattaatctgaattcaaaaggagttttattgttatgtccgttacctgtcgtcaaacgttatccatcagcaaccatcgcgtgttcgtcaacgatttaaatgaacacgaaaccgtttatggtggtcgtttactcgaattattagatggttcagcttcgatttccgctagccggttagcccgcgttgaaaccgtgactgccagtatcgatcaactcaatttcatcgcccctttcaagatgcaagactcactgtgtatcgaaagttacgtttctggcgcggggcaccggtcagtcgaaattttcaccaaaattatcggtgaacacctcaagacgggtgaacgtttcttaggattgaccgcgtttttaaccttcgtcacgattgataaaaacgtcgtgttgccttcaattgagcccctcacagctgaagaaaaattcatctgccaaggctacgcgcaacgtaaagcgaaccgcttggcgaccttccaaacccaaaaagagttcaacgcgcaaatcaaccttgaatatccttgggatcatcaattttaaccattaaaaaagtcggagcattatccttaactcaggataacaatccgactttttgattgtcttatttaatggccttcttataaataaaaagtccggaaccagtcatggacaccatgatattcaaacaattgcgtattatcaccgctagcccaatagctagccaccatgatgacgaggcctagcacaattagaatcaaactcacttttaaccaattctcttttaatgacactaacatctatgcgacctccttgtcacgtgctttaaattttgacaataaccagcgcgttaaactgactgaccatttcactaaataacagccagaataccaagctagtccagcacacaataaccccacaccaagcattgcaatgctcaacccaaattgcatcgatccaatcaaccagccttggcggacccccgcgataatagctaaaaagaagctaaccccaccaccaacaatgccactaatcgcaaaaatcgcggctaacgctggtactaaccagattaagaaataaccgacagcgattagaagaatggccgtcaatagtaaactgccccagagtggtgatccaagaacgactaccatgatgattagggctaacgtcattggggccgttttgcgttgccgaatgattggccgttcatcgctcaaccgggccgcaatctggcgtggtgattctaaactcgcaataatcgtcaattctgattcgccatcttctaagcgatcatcaattaattcttcatagtaatctaaggtgttggcggtatctctgacttgcgcttgcgctaattctgtcgctaacgcttttataaactggattttattcatcaaatcactcctttgatataatcataaacttgcatgacttctggccattctgctaaaaattgggcaattgcttcttggccaaccggcgttaaatggaaatatttccgtaaccgaccgttatgttcaacactgtaactttcgatttgttgctgtttttcgagtcgttttaaaatcggatataacgttgaatctgaaattccaatcacattcgatgtgtctttaataatttgatagccataggaatcttcggtgcgtagtgttgcgagaacacaaaattctaacaacccttttttcaattgtgcattcatgccatcaccctttcaaagcataatactatattatacatagtattatgtcaagtgctatattaatccacaaaaaaacacgctcaaccgacttggttaaacgtgttgcatttttgactgattaatcccgattaccaaagatctggagcatcgtgatgaataagttgacgaaatcaaggtataacgttaatgcacccatgacagctaacccagagattgagacttccccagtcgcaccgtattggcgatacatcagccctaacttctgattatcccacgctgttaaaatgataaagataatcaacattgcgtaagataagaaatagctgacggcggccgatgccatgaagaaattaactaagctgacaataatcacgccaattaagcccatcatcgcatacttaccaaaaccactcaggttattcttagtcatgcggccataaaccgacatggcgataaagactaacgcactggaaatgaatgctgaagcaatactcccaatattgtaagccaataaaatagccgtgaacgttaacccgtttaacgcggcgtacgcgataaacatgaacaacgatgcggttggattcttagttgaacgccgactgatctgaacgaccaacaacatttcaacaatcatcaacccccaaacgagccatgaactaccgccgtataaaacggccgctgtttgattcttaaaaactgtgacaagtaataccgcaacgagtgccgaaattccgacaccggctgccatcaagccataaacgcggctaaaaaatttagcttcgctatcgacatttaccattcgtctttccatcaatagtcacctcttaaatatttctaacgagttgcaatccctcgattagcaatattgtaacaaatagactgaaaaagacaaccaaaatgcctaaaaattaattatcttttggacttaaattgctcaaaagttcttcataagcatattcatacttttgaacatcaccagcacccataaacacaacaaccggttggtcaaaatccaataagggtgacatattatcgactttcaagacgcgaccacccttggtgattttagcgcctaaatcagcactcgaaactttcccgactttttcacgaactgaaccaaaaatatccgttaagaaaacttcgtcagctaagtttaaactagctgcaaaatcgtccattagggcaatcgtccgcgtaaacgtatggggttggaaaaccgcaatgatttgtttgttaggatatttttgacgagcagcatctagtgtggctttgatttctgatggatgatgcgcataatcatcaataatcgtcacatccgctactttcttttcagtaaagcggcgtttcacgcctttaaaatcggctaattcacgtgcaacttctgtagcgtcaatcttttcaaggtgactaaccgcaacgacggccaaactgttcaatacattgtgttcaccatagagtggcacgtgataatggccgatactttcatcgtgatagtaggcatcaaattcagacccttcaacggtccgttgaatatgacgggcttggaaatcatcggtttcttttgtgccgtaataataaatgggaacgttcgctttcaatttgcgtaattctggatcatcaccccaagcgaagatgcctttttgaaccttataggcttcagattggaacgcatcaaaaacgtcatcgataccggtatagtaatcgggatgatcaaaatcaatgttagtcataattaaataatcaggtgaatacgccaagaaatgacgacgatattcatcggcttcaaaggcaaagaatttagcatccttaatccctttccccgtaccatcacccactaaataactggtttgggccacgccacttaaaacatgtgctaataaaccactggtacttgtcttaccatgcgcaccggccaccccgatactcgtataaccttttaataattcgcctaagaattggtgatagcgaaccactggtaagcccatttcaagggcggttttaatttcaatttggtcgtcttggaacgcattgccggcaatgacggttaacccatcatgtaaattatcggcggaaaatggcaaaattttaaggtttgctttttcaagttcacgttgtgtgaatgtatattgatcgatatctgaaccttgaactttataacctaaatcgttcaatactaatgctaatgcgctcattcctgagcctttaatcccaacaaaatggtaaactgtgtcttttgttatcatctttttaaatatcctcttttcagaaaatcaattgtcattgtgtgttaaaaagtaatcccttttagtttaccatattgcattctaatcctaaatgctgtgcctctaaaaaatgcccgtttttaaacttttttgtaacggtttaattctagaaaaaatcaaattggatgaaattaattattttgaaacggcccagcaagtccgccatattctagtccacgctgatagtagcgtgattgaattcagtgctaaaatgattgatattgaaaagcaattgccacaattttataaagctcataaaagtatcttagttaatcctgaaaaagtggtgaagattgataaattgaaacgacgggtggcgtttgataacggggatagttgcgatatctcctatcggaaagtcacgggtctaatgaatttaattgctaccgctcaaccggattaagcaaaaacaagctgtgacagaactcggttatcaattgaatatcaagataaaaaggctggttatccttagttcgggataaccagcctttttaatttggattaatcgttattttttaatcgtgctagtgccgtcagcgtagtttaaggtaacaccattctcaacgttgaaaatgtagacgttgaactggattgcgtcgctaccaactgattggccttccatttgaacgccgcgagcgagtaattcttcacctttaaaaatcggggtaacccggtaacgaacgtaagccttcggattttgtttcaagaagtaggcgatgtcggattcatgggctaacatttcgggagcgtttagttgacgagtaccggtcatcaaatttttaggattattgttctgaccggttaattgataaccaattaaatgactacgattatagagccaaccggaactaatgcgtttgttgtgccaaccagttgggttccaagtcaggccttcgcgtttagcagtgggcatcaacgatttatttaacagtgcgttggcacttccaacccgattgagttggtctaagtcgctaaaagtctgccaagcgcctttagtggttgctaaatcagtggcattaaacgtgggttgattattgttaaccacgatttcgttttgattagtgtattgtaacgccgctagttcagttgtcgatgattttgttttgggcgttgtgtttaatttttgatctaatttcgcgattttttgatttaactggttgattttcttttgaagcttggttagcttttgtgtattcttgcgattcttaacttcgatctgatgcgcttctttttgtgttaggtcggctactttcgtttgagcaaaagttggttgtggttgcgctaaggtaacgcaaccgattaaggccaggccaattgtgagctgtttaagctgttttttaatcgtcattaatttctcctcctaatcttcccagccacaaagcgtgtagccttgcgcttgtgcatcagctagtgacattggaatgacgctgttggctcggctgaggccccggcagttaggatcattgtggtatttccgaccagagtccggcgcgatgtagaccgtgttttgcgtttgttccgtagccgcggcctgtgattgttgagctgctgcagcttgttgagcggccacggcttgctgactttgaacccgagcagactcagcggcttgttgactaacctgtgctgctgcagcaatcgattgggattgtgcagcgctgctagcggctgcttgggattcagaagcagcctgtgcttgtgcgattgaagttgattcagaagcaattttgacttgctttttgtaggctttttgtttcttggttaattttttagtgagctttttagcttctgcttgcttttgggttagttcttttttcaaagagctggaagtggctaagacggcctttttttctttagtcgataattttttgaccttggtaacgtcactttgcttagccgcttgtggttggtggcttggttgattattcgtcgccagacttagtccgattaaagcgacaacggcgactgttaagctgactaataacggggttcttaaaacgaatgatgagtgtttagcgcttttacgccggattaagtagtatccgacgctaacactaacgagtaaagatagtaataaaatattaatcatgagattcctccaaaataatttaatagagccactaatccccagaaatagtgaacaatgtcggtcaaaattaactcgtttgcgtatataaaagttaatgaatgatcagacttgttaagtataccaagattatcaatagaaaagcattcttattttaaataacgaacgataatattactagaaagcggattatcgttaaaaaatcatgataaaaccgactattaagttgaaaatccgcttattaatagtattatttatttaaaagacgtacaattatattcatcaatggaatattgaacggataatggaggcagtcatgatgtatcggattaaaattaataaaatgcaatttcattcacatatcggcgtctttcaagcagaaaaagaattagggcaacggatcgaaattgatctagcagtcacgatgaccacaccgtatcaaggcgatcagttagacgataccgttagttacgccgaattctaccaggttgtagcgcaactggttaaccgtagtcgggtcaacctagttgaaaccttagcgcacgatatcattcaagcaatccatcagttagatgccaagcgaatcggactggttcaagtgaatgttcgtaaaatcgcggtgccaattgatgggatttttgaaaacgttgagattgaaatggagggttagtggtgcacaatcaagtttatattagttatggcagtaatctcggtgatattcaggccaacattcagcacgcgctagtattattaaccgctgattcgcggattaggattgaacgtcagtcggcgttttatcaaacgacgccggttgggcctgttagtcaggctgattttgtgaatggcgctttaaagttgcgaactgattacgcggctaccgagttattagccgttttacaagcaattgaacaagcgtgtttacggcaacggacggttcactggggaccacgcacgttagatttggacattatttttttcaatgaggagcaatttcagacgccggcgttaaccattccccatccggaagccttcaaccgactgtttgtcttagtcccgattctcgaaatttgtaaggcagacttctatcaaaagacagcaattgaacaccaaattaacgtgttacaagcaacggcaacacaagcgattaaacgattagaagaggttgatgatggtcgataaaacagttcaacaaattgaaaaagatgttcgagatattttaaaacaagtcggggatgacccacagcgtgcgggagtatttgaaacgccgcaacgtgtcgctaaaatgtatcaagaagttttagcctatcaagggcaaactgattttaaagattataaactatttgaaaccgaaattgtggatgacgaccagctggttttgatgcaagccattccgttttattcaatgtgtgaacaccatatgttaccgttttttggacaggtcaatgtggcgtatctaccagcagaagggcggattattgggttgagtaaaattccgcgcttagttgattttgtgtcgaaacgattgagcgtgcaagaaaatttaacccgtgatattgggcagattttgaatcagattctagccccacaaggtgtggccgttcaagttacggcgcggcatatgtgtgttgaaatgcgtgggattaagaaagccactagtcaaaccctaacgactttttacagcggtcagttcaaaacggatcgacaattaagaaatgaatttttacaattattgaagtaggtgaaaagtatgttggatacggaaatggtgcaaactttacccggaatgttatatggtgatcaagctagggtcacgctattgagtcggattttacggcaaatgggccaacccgaccacgcgtttcaaattattcacgtttgtggcacgaatggtaaaggctcaaccagtgcgatggtggccagcattttacaaacaatgggctatcaagtcgggttgttcagcagtcctcaggtgatgtcagtcgaagaaagtattcaaattaatcaaactgagatttcgtctaaagattttaaccaaacgttacaaaccgttcaatggacgctgcaagagatgggattagcgccggataccgatttatcgtactttgaaacgctcgttttagtggcgctagtctatttcgaacaacaggccgtggactacgtggtttgggaatgtggattaggcggtgagttagacgccactaacgcggttgatcgagtggcttatactctttttacgaaaattagtttggaccataccgcaatcctcggtgacagtttaacggcgattgccaccactaaatccaaaattatccggcccaaaacgcccgtcatcgttgcgcccaatcaagcggcagcagcggtaaaagtcttgcaggcagaagggcaacgtcaacaagcgtccatcacgatggcgacaaccgattggctgcagctgactcgactgaccccaagtgggcaatctgttcgattaacaatgcctaatcaacccgctattacggttaccttagcgttagccgggacttatcagttggaaaatttggcgacgaccttaacgtggtatcgacaattctgtcaggaccaaaatcacgagttagacggcactgttttaaaaacggctttggcgcaggttcagttaccggggcggtttgaacgactgtcaaaccaaccgttaatcgtgattgatggtgcgcataatccagatgggatgcgccaattcgtagcgagtgtgcaagaacggtatgccgattatgatttgacgattatcacgggctttctaaaagataaagcggtgttagattgtttgcagctgttaacgcaattatcggcgacttttattttaacggaaccacaaaatccggatcaacgccaattaccggtagcggaattagttatgttatatgaacaactgacgcaccaaacggtaatcagtagttcgtcgattgaacaggcattgatgaaggcctatcaacaaccactaggccaacgaccacgtgttattttagtcgtggggtcattttatttgttaaaaacagtccgccaattagttttaaatcaaggaggttccaatgcaaattagtgaagcgcaaccccaccagtttaatcggacacttttgaaatttagcgggacaagtgccgaaattgagcaactacaacgattatgtttagagattgacgcgactattcaacaattagaggaccaatggtttggtcagtttaccatttttcaattaaatcgattacagcaacgttggtcgttttattttggccaagtccatcaaacattacagaaaatgatgcagggcaaacaattaatttggtcgggtcccggttttaaattcgatttaaccgtcaacccaattgtttacgcgattatcaattgtacgccggattctttttatgacgggcaacctagtcagcagttagggccaattctgactaaaatcgaagccgatttagccaatggggcagcagtgattgaagttggcggtaaatcaactcgaccggggtatcaagaattaacgccggatgaagaatggcaacggatcgcgccggttattcaagcggttcagcaggaatggccggctgccatcttggcggttgatactaataatgccgaggtgatgcgtcggtcagtgatgagtggtgtacctattttgaacgacgttgatggttttaatcaagttgcgaagttagccgtggttgcgcaacaccggcctagtgtggtgacgatgtataacggtcgccactttacggatgatacatttacgacgttagaccaattctatcaggaaacgttgactgaactggaacatgccgggctaacacggtcgcaaattgcattggatccgggggttggtttttcgaacgcgcaaaatacggcgtcattagatttatttaagattaagagtatccaaccgacaactcagtatcaagcgccgttaatggcggccatttcgcgcaaaagttttatggagaaacaatttgattatccgatggtggaacggttgacggccaccttgttattcgaacaattaatggttgaacaaggcgcccgtattttacgggtccacgatgtggcagcgacaaaaaagatgctgcatttatttcaaggttaccaacaagctaatttattaatggcggctaaatgaggaccgcgctagtggcagaattgcatacgttagcgttaaaaaactatgcatttaatgacccgtctaaataccaagaaattgagcaacgagtcaatgatcagcaaccaccattttatcgcggattaaatgctgaattacatttatcagcgagtaccgtagtttttagggacgatcaattattgatggtcaaacacccctatttgcaccaatggttattgccggcggggcatgttgaatacgaagaagcaccgagcacgacagcgctgcgtgagttgctggaagaaacgggattaaccggggttaatccgatcttagttgatatcaatctgattaatattccggccaatccggtcaagcatgagtcagcgcaccaacatattgattgtcgttattgggttcaaccgacgtttcaagttgcggagacggcggaactgtcgacgcgttgggtctcgagggctgatgcgccagtggagtttcaacattattttgaactattgaatacgtaatcgttttcatctatggtatacttaggacacaattgaataacacatctggggtgcctacaagctgagattatacccattgaacctgatatagttagtactagcgcagggaaatgccgtgtcgtttaacgattaaacgagcttattttggtacccgtcaattcatatgaattgacgggtctttttagtggcgttggttagcctcagacgtgaatcgaatcaattgaattggaggcactatgtcatttattaagattgtgcaacaagcgacattaccctattggactgggagtttgcaacacccgtttattgttgaactacaggcaggaacgttatccgcggactgttttcgctactatttgatacaagatcattattatttacaagcgttcagccgattacatcagttagtggctgatcgttgtcaagattcggccttaaaacagttaatgctgactggtgcggccgatttagaaagtggcgaagcgcttgttcgccaacaattttttcaagaattgcagatcacggctgacgaattagcccaaacgccggtcgcccccacaacggatcactatattgcacatttatatcgacaattgacgattgataataccgcaattgcggcggcgggtttgtacccttgtttatggctatatggggatgtcggtcaagcgcttagtcaaaggacgtcaccaaatccttattatcaacgctggattgagacgtatgcgactgatgaattacagactgaaattcagacgactggtcaggtgcttaatcggctgtacgcggctagcagtccgctggatcaagaacaaatggtacacgcttttgtgcgcagcagccaattagaatatcatttttgggaaatggcttaccgtcaagaacaatggttagcgggggcagtccaatgaaatcaaaacgaattaaacggttaacgcttctggcgatgatggttgcactggatgtgattttatcacctttatttcgaattgaagggatggcgccgatgtcgagtgtcttaaacgttacggccgcagttttgatggggccattatacgccacgattatggcgttgatgaccgcaatattacgaatggtgctactagggattccgccattagccttaaccggggcattatttggggcactatttgccggattgggttataagattagcggcaggttggtagcgcgattggtggtgaaatttttggcactggcatcatcggttccttattatcgtatcccgttatggtctggtttacaggaagttcaaacggtttattttggttggtttataccccacgattcttagggggtgcgatttccgggagtgttgttgcgtggttagtcttgtataaattaaaagaaacgtcgattttccaaaaaagtcgcacagtattccaatcgaaatgataagttattcatgagcataatcagcgcgtttttgctggcactttgctatccttgaattatagaggaggttatatgatgcaaaactatcgtgcttattggcaaaaaatgtttgtctttgatgcaactgcaacgcgtgtacagtattggtgggccgttattattaattatattatcgtcggtctatacgcatttggaacgaatcagtctcaatatattaatgccagtggtgattatcaaatggcatggaacgcgaattcaatgatttttgcactcatcttaggactcgtctggctcgctaacttcaccattcgagcgcggcgtttacatgatactaaccgtagtaactggtggatcctaatcagtatcattccaattattggtcagatttggctctttatcttactggtgttaccatcgaaagccaatgatcgttggccagcaaatcaatcagaagttcattaataatacgttagaagcgcttaacccgggtcactggattaagcgctttttaggttgatatgactggttatttaactgaattgttgctaagataaaagagtactattaatgaatcaaaaagggatgaataatcgtgaaattatatacgaaaaccggcgataaagggttaaccagaattatcggcggcggtaaggttcgcaaaaatgcactacgagtggctgcttacggcgatgtcgatgaattgacgtcatacgttggtttaattattagtgagattgcggactatccagatttaaaaacgcaactaattgaggtgcaacaaattcttttcgattgtggcactgatttagcgacaccggatgattcgcgtggttatcgcacgaaaccggaatatacggcttggttggaagttcagattgaccgctatgctgacgtgccaccagctttgactgagtttattttaccgggtggcgctccaattgccgctaagttgcactatggacggacaatcgcccggcgagttgaacgccaagtcgtggcgttacaggaagttgaagccattaatcaagatgttttgattttcttgaatcggttatcggactatttgtacgcaattgcgcgctacgttaattttaaagccggcgtcactgaaacgaattatcggcgcaacaagcgaatttttcattaataacaaactgtgtcagcattcagttatcaattgagtgatggcacgcgtcaaaaaagacccgcaactttaaacggttgcgggtcttttaatggtcattggaactgttcgatattttgtgcaatgaccgttaaggcttgttccaacaaatcgatgtggttcgaggatagcgcaattcggataaacggatcgggttgtttcttagtcgtgaaacggttggaatgataaatccgaacaccttgttctaagaaataattttcaatggttgtttgatcaattttagaactaaccggtagaatccgatagaagggtaccggattagtcggtcggggttgatcgaatagttggtcgaaaaattggttggcttcttcagtcagggctaatttacgagctagaattgtttgggcggtgggactttgcaaaatctgggtaacgacttcagcgttgaaggctgaagttttaacgttaatgttaaaaatactacgttcaattcggctccgatagttgttgggataaacaagataagcgactcgtaatccggaactaatgaatttcgccatgctggctaaatagattgtttgttgcggtaataagctttggaaagtggggagctggtagtcgattgcgaaattagttaagaaggcgtgaatatcatcttcaatcactagtagggattctgtcgcaaaaatcgttgccaatgcaagccggcgttcggtggttatttgaaaaccaatcggattattgcaagctggcatcaaaaagacaccgtgaattttcttcttatgacattcagtcgctaataactctggtaacatgccatcttgatcaccatcaatcaaaacgacttcgatttggagtaaattagcaagttcaataaaatttgaataggtgtagcgatcaactgcgacgcgatcaccggggttaaataaaccagccaaggtaatggtgagtccgttttggacaccggcgacaatcgcgacgttatcgcgatcgatggcggatacgccttgtgtttgtaaccattcggccgctatttggcgttgctgtggtgtgcctaaaggatcttggtaggttagcagcgcttgaacgttgggctgttgactcacccgtgctaaataaggggtgaccaagtcattgcattcttcaaaagaactaaccaagcccaaatcaattagatggtgatcgacgttatgatttgaaatcgtgatggagttaaacgcgttttgtgaaacaaacgttccgctgccaatattggtgtacaacaaacctttttcgaggccgtatttataggcgcgaccgactgttgtaaaattaatatctaaaaaatcagcgagttcacgctgagacggtaagcgagtatttttttgaagtcggtgggataaaatatcggcttctaattgttggactagcgaccggtaatagggccgcgtcagttgggtgcggtcgggctgccaggacaaggggtattgttcgtatgaattaattgacaagttaaggacctcacgtttttttgtattgcatacaattatactattgaatgtaccacttgtcagcggtaatttagtattatggaggcgaataatatgaaaattgtcaattttgaagaaacgttagcgattttaccgattgaaaaaacaattgcggtgatgaaggcttgttttgccgatttcgagcaggggaagattagtcaaacaccacgggtggtccaagtattgccagatggtgatcaacagaatttgtttgcgatgatgcccgcctatttaggtccagatcgagtttttggtagtaaggtgattaccgcttttccaaagaatgctggcactgaatatcaatcccatatgggtcaagtgatgctctttgatagccagcacggtcaaccggtggcgttaattgatgcgaatgcgataacgtatattcgcacggctgcggtgactggattagggactgactttttagcgaaaaaagaggcgcaagatttagcgctgattggtgccggtcaacaatcacattcccatttagccgcgatgttagcggttcgtccaattaaaacggtgcacgtgtttgatttaaacgcggagcaagttgcacgttcaattcaacggatgcaagtcgcttatccagcagtcacgtttattgcggcgaattcggtccaagaggctgttgctgatgccgatattatttgtacgttaacccctagtaagcaagcattcttagaaaaaggctgggttaaaccaggggcgcatattaatgcgattgggactttcacaccaaccactcgcgaaatcacgagcgatttaatggttgcgagtcgattattcgttgacgattatcaagcggctaacaatgaaagtggcgattatttaatcccacttgctgaacaggtcattaccaaagaccatctgcaaggctcactaggtgaattagtgactaagcaagtccaaggtcgccaaaatgaaacagaaatcacgatttttgatgcggtcggtttagcagtcgaagatttatgttgcgctgaatacgtctatcaactcgttaaagagggctaacagatgaaatattatattgttgatgcgtttactgaaacgatttttcacggtaatcccgctgctgtttttgtaatggatcagtggctagatgatcaaatgatgcaaaaaattgccattgaaaataacctatctgaaacggcttttaccgttaaaaacggtgaccattatgatttgcggtggtttacacccgatcgagaaattgatttgtgtggtcacgcaacgttagcaacggcttacgtcttattcaacgaatatcacgaaacggttgatcgattggtttttagtagtcaaagtggcccgttatacgtcacgcgtaaggctgagacgtattatatggattttccaacgattatgccgaaatcaacgccaattttacctgaatatgaagcggtgattggggctaagattcaggctgcctatttaggacgagatttattcttcgtttgtgatgatgaggcaacgattgctaagatgacgcctgattacacggaaatgctgaattttgaattaggggttggtgtcattgtgacggcccctggcgaccaagtcgactttgtgtcgcgaacctttttcccgaaattaacgattaatgaagatccggtttgtggttcggcccattcgaacttgattccttactggtcgcaagtcttgggtaaagctcaaatgactgcccatcagatttcaccacgcggtggcgttttagactgccaactgcagggcgaacgggtgattatcggtgggcaggcgaccttatacgcgcaatgtgaagccaacttttaaggttttgatcgagcacgtcgtttaatgacgtgtttttttagtggtacttttcccataaacagtgaattcgtttacatcttaaaaggggcatgctaagctattctagtaaaacgaaataggagatgagtgcacatgacgattaaattaattgcaattgatattgatgataccttattgagttcgcaacaccagattttagacagtaccaaaagccaaattaaaaaggcccttgatcagggcgttaaaattgtactctgttctggtcgaccattagcgggtgtcgcgccatatttagcgcagttagggattgctggtgatcaacagtacgtcgtgacgtttaatggtagtgtgattgaaacggctgctggtgaaatcattcaacaagttggcattacgcatgaaacttatcgcgctgttgatcagtattctaagactaaccaactcgcctataatgtattggatagtaatagtacgatttatacgagtaatttggacgtcgacccgattacggtcgttcaagcttgggagaatgaagctggtttgttaattcgacaaccagatcaagtgaaactggacgttaaaatgattaaagccgtttttacagggccttcagcagtgctcgatcagcatgaagcagcggttaaagcgcaatttggacaggaaaattatgtcgtgcgtgcggggagtcgctttttagaagtcatgcaccgagcagttaataaaggggccgctttaaaacagttagcgagacatctacaaatccaaccaaccgaaattatggcgattggcgacgaacaaaatgatattccaatgtttaattttgccggaacggccgttgcgatggccaatggttcggctgccgctaagcaacatgccgattttatcacaaccgataatgatcatgacggtattgctcaggcactggatcaatatattttttaatgcatcgtaaaaggtcagagccccagtggttgtgatctttttgattgttgacaaatagaccgaatattgatattataataaacgttgaaacgcagtattgcggacaatatggagaattacccaagtctggctgaagggaacggtcttgaaaaccgtcaggtgggtcaaaccacgcgagagttcgaatctctcattctccttaatcgaaataagtgtgttgagttgcgggtagcaactgagcattaacgaaaatcccccagttatcttgattttaagataactgggggatttttggttaagcggaggttgttgcaactcaaaagcatgttatcaattgcctattaagttaaaaatttatataataaccaattaaaaaagcgaatcttagcgattcgcttttttaattggttatttgtcgtaagttgtaaaacggtcagtatcgttattatagtctttagcgtctgctgggttttcaattgaaccaaatggcatttggctccgaagtttccagttagcggggatgttccattttgcagtcacagcatcatcaatcactggattgtaatgttgtaagttggcaccaatgccggcttcagctaacgccatccaagtggcgtattgcgccatcccgtttgattgttcagcccaaactgggaagttatccgcatataatggcacgtttgcttggaggcccttaataacagcttggtcttcaaagaatagaatggtgccgaccccgtttgcgaatgatgcgagttttgcttgcgtagcagggaagttttcagcgggtgtcaatgattttaaagcattggcagtgatatcattccacaatgttttgctagcatcgccgaataaaatgatggcccgtgaaccttgtgagttaaaagcagaaggactttctttaatggttttaaaaattaaatcagaaacggcttcttctgaaagattgatatggttgccaagtgcgtagattgaacgacgcgtttgttgtaaatcgaatagattagtcatcagtaattctcccttaaataaatgagtttgtgtttcaacaccttaaatatagaacacttacaaaatgtaagcaaagtcttttgtgttaaattttaaaatttaatcgaggattacttgggattcgattgttaagagtgcgctaacgtaggtggaacagccagtgaatggacacaaaaatagcgttattgtaatttacaataacgctatttttgtcttttgtattttacaactattcaataattgagtttactttatgcggtaaatctgcttgattaaccgcagcccagccactaatgaaacggccttttgcctctaattttaaataatgattagttttaagcttttgtggggcttgaaaagtaatttgataatgagtgccgtttgctcggtaagcttcttgcgtgtaaagataatcgccatgactttgaatttgaccataacgatcagctgtttttagataaaccgcttctttcggaattaataaattaaaacgatcccactgttgagctaacccaccattgctggtactcggtgttaacgcggagccgacaacgggaagacctccgataaatagaataaatgttgcaactaacagtattgcttttttcattacttttaaccgccttttcatttgaatagatttagtttagcaggcgtgaacactggattgagtcggtctgaagttgtaaaaaatcgtaggcggtcgaacaactttgtaaggttgtttcataactagcggtttatgttcagtgaataatcctttataatggtttgatagaagagacattgaaaagtgggtgagtatcttttgaaagaagttcaaacagtcgtgacacaattaatcgacgtcagaatggcgcttcgacaaggcacgatctatcaatctgtgccagaaaaaatattgacgattatggacaacgtcgcttataaaagtcgccggacccacgtgattgttccagatgatgaatctcaaatcatgacgttactcgaaacaattaatcagcgcttgaatcaggatgacaagaaagcaacggtgactgatctcgaattagatcaactgttacaacacatcgttagtccgaatacgaaaattagagacaaaggcatttttaatttgtttaaccgcctattgcgtaaatacgtgctaacggcggaacaagtcgtgtgggttaaggatcgcttgattagtgatgactacttattcgcgcacatcttagaacctgagaatgatggcatctttttacgctcctttagcgtcatgtttctagcgggcatattgtatgccaatcggacgcactatcacgtcttaaccgaagctgagttagtggcgattgaactgcgggtgatggcgtacgcaatcattgaactagattctcggggctatgttgcggacaaaggttgggcgcatgcattaacccacattatcaacgtctggtcggaattgaatgagacgcaagaattacaacgagccgacaaattattgatgatggcggttctaatccaggcctatcgtttttcagataacgctttggcatatggcgaagacagccatttagcgaatgttttaatggtgttgcttaaaaagaaccagttatataccgattatttcttagccgtactacaagattggcaaaagagtttgttaaacatcgttccagaagattccatcgctttttggaatcgttggtacaatcggaatcgctttttacaatcactgatgctccaaccagaactacccactgaaattgacgattatttacgtaaaatatcggatttattttaattaagagagataggattgaagattgaatggcagttaaaggaattgtttttgatgttgatggggttttggtcaacagtgaaccttattattttgaacaacgtttagcttatttaaactcaattggcgtaacgttatcacttgaagcgaatcggcgcttcattggctcgaacatgaacgcggtgctagcccagattttcccacaaaaatcacttgctaagcgcaacgagattaaagcgggttattccgccttcaaagcggcgcatccgatgcaatttaaaccgatgctgaatacggacgcaccacttttattacaacagatttgcacggattgccagattggtttagcttcggcgggtgaacgtgttggtatcaaccggatgttagccgaaactgcgttaacgccgtattttgaaacaatcattagtggtgctgaaacggcccacaataaaccggcgcccgatgtttatctcgcagcgctggctgccttaaaaatcgcgccaaatgaagcggtcgcgattgaagattcaacattaggcattgctgctgggaaagccgcagggatgaccgtaattgcgctacaaccattagatcctaattacgaaattgatcaaagtgcggctgactatcggattggttcgctgttagaggtcccaacgttacttgcccaattaatgatttaaaacatcaaaggagcattgctgagcccgacctaaggggctttagcagtgctcttttattgtttattttatgaaatgggtcattattttttagcaataaattaataatgaggcggaaatgtcaacgggataattgttggccatacaatataaagatgggctaaatcgataaataattgatgcattataattagttcatcgggtataataactatgaatgtaaataggtgatactcaaaagtaattatctaaatacggatatgatggagtttttagagatgaaaatattagggacaaaattaaaagaaattcgtaaagctaacggcctatcccaagcagaattagcagcgggtatttgtacgcaagcaacgattagtttgattgaaaaaaagggccaagtcccgagtaccaaaatattgctcagcatttgtcagcgcttaggcgttcctatgacgatggtgattgcaaatgaaactgatgaggtgcatgaattactcgacaaagtacaaggactgctatttgatggtgattttaaacagggcgaaatcgtgattcaggcgatttcaattcacgaattagtatcagcggacgattataaacggtattattattaccaaggccaattaaaactgttggctgatcaaaaaccagatgacgcgctatttttctttaatcgtgcgttcaatcaatatattatctcgcccacggatgtttatggggtgttatgtacaattggtatcagtcgttcgtatttattgaagaatgcacctgatcgtgcgcggctgtacgtccaacaggctgttgaaagtctgacgggtattgagctgacggttgcggtggacttacagttagaattaaccatttatggcagtttggccgctatttatcacgaattacatgaagaaaaaaccgctgctaaatacgcgcaccaagcaattgaccgcgcggttggccaaaaaagtttgtacttattagactatctttatttgattttaggccaggcagaacgcgtcgacaatcaacaacaagccctagcagatttagcaactgcccaaacgctagcgaccgttcgacaacatacgggtattttagaacaagttaaaaatcagttgcatagtagtatcggttaatggttattaaataaaataaaacgagcgcttatccgcagtagtagggataagcgctcgttttattgtcgttatttttaagccgattagtgattagtcctgaccgatggtgctctttttcttagcaagagctggtttgttggccaaatcagttctaacgactagtacgtcgcaaacggcagtccgagtcacgtattcagtgactgaaccaatcaatagccgttcaacggcgtttaaaccggtcgcaccaatcatgattaaatcaatctttttcttttctggaatttctttggcaattaagctcttaggtgcaccatattcaatgctgaaatcaacgtcttttaagcctaaatcattggcagtgacgatgtattcattcattgttttcttcgcagtttcggtgacttgttcaaccattgcagaatcaaaactcgagatattttggaaagcccgggtgtcaatgacatgaatcaaatgcaaatggccttcatttctaagcgcaacttcgaccgctttacgaaaagcgagttcagcttcataagaaccatcaattgccactagaatgtgtttgtattgttgtaacatattcatcacctcatttagttttacaaccttattgtacgctatccagcgggtaaatgtaaaaagaaaaggcttttataggctagtggcgaagcaaataccgacaaaaccagcgattagactagcgataatcacggtaatcaaggtccaaattactggtagcaacagtaaaattaacagaccacagacggccgtaatgatcaataaaataccggcaatcaagagtacgtggccgagtcgcgtattttcggttaaatcaaaaatcatgaattgctgattatgataacgatagagtaccaatccgagtagggcgataatgatgagaaaaataacgataacagtttgaatcaaaggtcaatcctcctaaatttaatccaacaaaaagggccaacgaaaacgttgaccctaacaaagtcgttggactttgagaaatctaatagtgccgtaaatgcttcccgatagttgagcccgcgaaaggtgcaggtgggtcagattattattaacactggttccttcgtgaagaagtatacactagttaataactcatccgtcccattaacgaattacttgatcggtcaacctaaggtgggaagacgcgaacaccctagaaatcttatattcatagtagcatgattaggaatgtgatgcaaacgatttgtaaccggtgtcttaagaacgcttggcttggcgtaaccggattaattgttgttttaagacttgttcatatttaccagtttctttagcctcgtaataatgcgcgttggccagtttagtgggtaagtaatcttgggcgacccaatcgttgggataatcgtgcggaaatttatagtcaacgccgcgcccgagtttgtcagccccaacgtaatgcgcgtctttaaggtgcgcggggacttcgccggctttgccagcgcgaatatcggctaaagcgttatcgattgccgaaatcgctgaattcgatttcggcgatagacataaatcaatcacggcgactgctaaaggaattcgagcttccggaaaaccgagttgtttggcagcggcaatcgcttcaaccgtccgagcgcaggcttgcggattagcgagaccaacatcttcgtaggccatcgtcattaaacggcgactaatggacggtaaatcgccggcttcaattaaccggcccatataatgcaaggccgcatcgacatcgctcccgcggaccgacttttggaaggcggagatcacgtcgtaatgtgcgtcgccatctttatcgtgggttaacgctttttgttggacgcattcttcaatcacgtcgatatcgatttgaatcacgccatcagcatctttaggggttgaacgcaccgccaattctaaagcgttgagtgcactgcgtaaatcgccattggtgacgcgtgctaagtactgttcagcgacttcgctgagtgcgactggctcatcacctagacctttttctttatccgttagtgctcgttggagtgcgacgtggatgtcggcttcagctaagggtttaacctcgaagatttgcgcacggctccgaatagcgggattgatactgatgtaggggttctcggtggtagcgccaatcaaaataatgcgaccactttcaagatgcggcagtagaaaatcttgtttggttttatcgagccgatgaatttcatcgagtaacaagatgacagtgccgctcatcttggcttcttcggcgacaatttgcaggtcttttttactatcagtcgcggcgtttaacatccgaaaagcgtattgggtactgccggcaatcgcgctggcaatactggttttacccgtaccaggcggtccgtatagaatcattgaagagagtagtttggcgttgaccatgcgccgaataattttttggggaccaactaaatgagtttgtccgacaatttcatcaatattagtcggtcgcatgcggtaagcaaggggttgttgcatgatggtcctccttaggttattttaatactagtataacatgatagtgaactatcgtttaaaaaatggtgaagcatgtgtataatgatggtacaactccgagtaaaaagaggtcagtgtcatgtcgaatcaactttttgaaactattcaacaacttaatctagcaccactattgaatcgtggtgtttttggaatcgaaaaagaaggtcaacgaattgatggtcagggtcatttgagtgccttggcccatcctgatattttgggcgaccgtcaatttcatccctatatcggcactgattttgccgaaacgcagacggaaatcgtcagtgatcagtttgataatacgattgaggttgaacagcaactgtccgcattagagcaagtgttacaagcgtcattaccggactgcgattatttgtggccgttgagtatgccaccagtgcttcctgctgatgaaacccagattccactggctcattttacaaaagacgtccaggattatcgggaatacctcgccaaacgttacggtcgccgcttacaaatggtctccggaattcactataattttagtttagattcaacgttattagcacgcttgtatggtgaatattatcatgatcaatatgcgcagttgagtgattttagcgatgcactttatttgcaactcgctcaaaattatcaacaataccggtttgtcctgacttacttatttggggcgagcccgattgcagaagccggctttttgaaggccggtcaatcggcaccggatcatccggttcgtagtttgcgagcgagccaactgtttgggtacaccaatcatacggccaagattgattttgaatccgtatcggcatatgtcacgtcgatgcaaaccgcgattcaagcgggacagttgatttctgaacgtgaattttacggtagcgtccggttgcggagccattcgttggcctcgttggcgactactgggattgattacctcgaatttagaggttttgatttaaatccgtacgccattaccggtatgacccaaaaacaacttgattttctccatttatttttcacctatttattggcgttacctaagcaagcaggcacgctcagcgaacgattgcaacaagggcaagcggtcaatgaacaaattgcgttggaaaatccgaaccaaccgtcgagtcaacaggcgattctcgttcaaattatggctgatttgcatcagtttattttggattatcatttcgaaccgcgattcttagcggcctgggacgtgatgaatcagcaagtgcttgattatcagttaacgaccagttatcaattggcgcaagcgattcaagatcattcattaacggcgtttggtctcaagcaagcgcagtcgatgaaacaggcactattggctaagccctatcaattgcagggttatacagatatggaattatcaacgcagatgttgatgtttgatgcgtttcaaaaagggttgcacgtggccgtcttagatcgtgcggatcagtttgttgagttaacctatcaaaaacaccacgaattggttaaaaatggcaatatgacgagcttggatcaattagtcagtttaccgttagtggataataaggtggtcactaaaattctgttagcgaatcacgggatgcgggtgcctgcgggtgctgagtataccgatgttgaagcggccgttgcggattaccaagttgcgtttggtcaacgagcgttagtggttaaaccgaaatcgagtaatatgggggccggcattacgacctttgtcacccgaccaacagaagttgatttcaaacaagcgttccaattagcgcaagcttacgattcgcgggtattggtcgaagaatatattgccggttcggaataccgtttcttggtgatgaatcaaaaagtccaagccgtcctcgagcgcgtgccggccaatgttgtcgctgatggtcggttaacgattgaacagttagtcgccaagaaaaatgataacccgttgcgcggcgaggaacacttgacaccactccagaatattcgcttaggcgaacgggaacaattaattttgaaacagcagggttatcaagtgactgacattccggcccgtggtagtcaaatcttcttattgcaaaattcaaatatttctaacggtggtgattccgttgatgtgacggatgaggttgatccaagttactttgcgattgcggaacaagccgccaaggttctgaatctgaacattgccggaatcgatattattatgcctaatctataccaagcgtataatccggaacatccggaaatggcggtcgtgctggaagccaattacaatccagcaatgctgattcatctgttcccgatgatgggcaagcgccggcgcgtgactaagaaagttttagaattgctatttccagaaatgtaattaaaaaacgtgccaatttctcaatgaaattggcacgttttttgattagtcgaataatcttttaaaaaaactatctttttcaggtttttcgactggtttattcgtggtggttgttgggtatttaagctcgattgcaatcgggtcacaattaatcgcatcggcagcgacgaccaacaaaccaaaggcggtcgaatcagtgtgggccgtttcgttattgacgagagtaaaggggatgcttttagcggagagggcggctaaataacctgtcgccgctgaatttttaccgtttaacaatacttggtagtctttgaactcgatcaaatggctttcgaataatttttgatagtcagcttgagccagttgttgattggtcatgctgaggaaaacgcgttcccgcaatgaaccgaggtagcgtcggcgttcatcgggattggtttggggcgtcccatgcatggcactttctaaatgttgttgaagttgatcgttgtctgtcaaaaaggtcacctcatttgtaaattatgctatattataactatcagtatagcatgaggaggaataagatgtttactcaaactgattttacgatttttaacgacgaaacgctcaaggggcgtttagacaaaatatatacgcaattggatccgaagttcgagacgttcggggcgcaattgcaaaccgcgtttaaagcgcaggccgatttagactttagcctgcacatcgctaagcatttacgccggtttaaaaatccaccgatgaatacgtggatggcgcttagtgaaagctcacggggctacaagatgttaccgcattttgaagtcggtttttgggatgaccggatctttgtttggtttgcactgatggccgagatgccgaacaaaccggattatgcgccgattttagtgcaacaaacggatcagttgttaactgaatttaccgattttgatttaagttacgatcacatgactaaacaacagttcccgatgtcgaccgataatttggcattgatcaatactaagtttgccacgaccaaaaaaggggagtggttactggggaaagtctattatcaagatgatccgttgtttgccacgcctgaaaaattgatggctgatattcaaacacgactcttaaaaatggctgatctatacaagctggttaaataagctcacaaaaaaagcatctcccgtaaaggagatgcttttttagacaaccaatgaaacggattaaagtttcttgttgtagaattcaacgataagtgcttcgtcgatttcaggttctaattctgaacgttctggtaaacgagttaatgaacctttcaaagtatcagcatcgaagctaacgaatgaaggacgaccaacagtgccttcgatagcggctttgatgatcacaaggtctttagatttttcacgaattgaaatttcttgaccaggtttaacttcgtatgaaggaatatcaacacgtttgccatcaacggtaacgtgaccatggttaactaattgacgtgattgagcacgtgtgcttgctaaacctaaacggtaaaccaagttatccaaacgttgttcaagtaagaccatcaagttaacaccatgtttaccttcgcgaattttaccagcgcgaacgaataagttttggaattgacgttcgtttaaaccgtacatcatacgtagcttttgtttttcgcgtaattgcataccgtattcagatactttaccgcgacggtcattaccgtgttggccaggggcgtaaggacgacgagcaagttctttgcctgtacctgaaagtgagatacctaaacgacgagaaagtttccatttggggcctgtgtaacgtgacataaataaatcctccaataaatgttttggagtaaaataatccgatgtaaacttagtaatcgttcagtttgtttaacaatcttcgcctttgcagccgcaaggttacgcaattgaaccaaaaaatatgggcaaacaaactgttgacggctttaccgtttactgctgcattattttacacaatggctagtataacgtatcaattggaaactcgtcaagctttttacggacgagaacgcttgttttttatgaacttatcggcaatttatgctgaaccggcaccgtattcatgctataatcaagaatagcttaatagtatcgactatattttaaaattcagttaaatcgcaaaagggtgggtctttggatgtttttcattctgattggaatcgtagttattgcgcttatcttatatatgagcgttattttataccagcgacactttgtgacacaaattaaacaattagaagaacgtaagggcgatttaatggcgttgccgattccagaacggttgacgaaattgcggtcattacacttaaccggtgaaagtttagacacttttaaacggtgggagaaacaatataatgaattaacgaatcataattttgcgacggtcgaagggtatctatttgatgcggaaacggccaacacgaaatatcaattcttacaggttaatcgtgttttaaaacaattacgggcgtacttaacggaaacggatcaagatttagtggacgttcaagatgcgcttgaaaatttattggcgaatgaggccgacacacggcaacagattcaacggttacgtgagaagtaccaacaattgcgtaaacgtttgttgaccaagagcttctcatttgggcctgcgctcgatcaactagaagcgacgcttggtcgattagaagttgattttgatcgcgccaatgaattgacgacggccggtgatcatttaggcgccaaagcgattttacaacaattgattaccgaaacggatcaattagagaatcggatggaacgcatcccgaaacgctacaatgaattagccaacgaattcccagaacaattggctgaaatcgctgagattgatcaaagaatgcgtactgagcattataattttgttgatgaacaaattacgattaaacaacaacaactggaagatcaatccgataagagcttatcattgatgagtcagttagacattgaagcggttgaagccaataacgctgagattgcccacggtatcgatcaactatatgaccaattagaagctgaaatgatggctaagaaaaccgtcgatcaacagatgccaacggttttaacgtttgccgaacatgctaaggaccaaaatcgcgaattattattagaactggatcatttaaaccaaagttacgccctgacccacgatgagttaacgacgaccaaggatttaagcaatcaaattagcgaacaaaccgcgctattgactggttttcaaaagcagattggggcgcatgaagccgtctattcagccattgccgaagaattagtggcgattgagacccgtttgactaagattgaagaacaacaacaaaccattcatgatcaagtggccgacttacacgatggtgaaaaagtcgccaacgataatttacgtcaatttgaattggaattgcggaataccaaacggtctgttgaaaaattaaatttacctggtttgagacaaagctatttagactttttctttgtcgtgtcagatgaaattaaagctttagataacagtttgaaccaaatcaaaattaatttagatgaaatcgcgaaacaattgattttagtacaagaggacttagatgaattgaaacaaaagaccaacgatttggtcgacagcgcgctcatgacggaacaactcttgcaatacgcgaaccgttatcgccttgattttcctgaaattcaagtcgcttgcgttgaaacccaagctatttttaatgatgactatgattatcaacgggcgttagatactttagcgaccgcgttagaaaaagtggatccaggggcttatactaaaatcgaaaaaacttatttccaacaaaaagaagtgtagccaatttaggtcaaagactagaattatttctagtcttttttgtatgaagctgttaagattaataactagcgtttcaaattcactttgttataatgaaaaacaaaaatactaatttttagtaagaaggattgatatgatttattttgacaatagtgccacgacacagattgcaccaggcgcgttagagacttaccaagcggttagtcagcaattttacggcaatccatcgagtttacacgcgattggtgagaaagccttccatatactggaacaatcacgtcaacagattgccactttattaggggttcaatcagacgagatttttttcactagcggtgggaccgaaggcgacaactgggtgctcaaagggactgcgattgagaagcaggctttcggtaaacatttgattacgaccagggttgaacatccggccatcattaaatcgatgcaacaactggaaaaattgggctttgaagtcacttatctgcccgttgataaaatgggacggattaacccggctgatttgaaagccgcgattcgcaaggatacgattttggtgtccatcatggcggttaataatgaaattggcagtcgccaaccattagatgaagttgcgacgattttagcggattatcccaacattcattttcacgtcgatgccgttcaagggattggcaaagggatgcaatcgtcgatttttaacgaacgcgttgattttgtgacgttatccgggcacaagttccacgccccccgcggaattggtatcttgtataagaaacgcggccggcacatcgcgccactcttaaccggtggcggacaagaacatgatttgcgttctggtaccgaaaatatcccagcgattgcggcgatggccaaagccttgcggttattgttaaccgatgaagcaaacaaggtccaacaacaaaacgccattcggcaacggttgtacgaccatatcagtcaagccaatcaaaccgtgatgttttcacaaatgacgccagagtttgcaccccacgtactgtgttttgcgatcaaaggggtgcgtggtgaaaccatcgtccacgcttttgaagaagatgccatttacatttcaacgaccagcgcttgttcctctaaaaatggcacggaatctagtacgcttaaagcgatgaatatcaatgaaaaaattgcgactagcgcagtccgcatttcattggacgaacataacacgttggctgaagccgacgcttttattcaatcgtttgaccgaatcaatgaccgttttagaaaaattaattcataaaccacaagattaagggagaccaacatgcaatatactgaaattatggttcgctacggcgaattatcaactaaaggtaagaaccgcaacgactttatcggtcgtttaaacgggaatgtgactaaggcgttacatgagtacaccaacctccgtattcatccgaaacgtgaccggatgcacattgtcttgaatggcgacgatgcggatggcgtgattgaacggttacgccacgttttcgggattcaaaatttctcacctagtattcaagttgaacgagacatggacgcagttaaagcgaccgctttggcgatgatgcaagaaattagtcaacctggaatgtcctttaaagtcaacacacgtcgttcagatcataagttctttttagatacgaatgaaatgaaccgtgaattaggtggttatttatcagatgaattgcctgaattagaagttcaaatgaaaaaaccagacatcacgttccgcgttgaagtgcgccaagatgcgatttatttgacgagccaagtgattcagggggccggtggtttaccggtcggtacagctggtaaagggatgttgatgctgtctggtgggattgattcaccagttgccggttatttagccttgaaacggggcgttgatatcgaaatggtccatttcttcagcccgccttatacaagtgataatgctttaaataaagccaaagaactatccgctaaactggttccttacgtgggcagtatcaagtttatcgaagtgccattcactgaaatccaagaagaaatcaaacattccgtcccagaagggtatttaatgaccattcagcgccggatgatgttgcgcttaacagatcgggttcgcgaaatgcgtaacggtcttgcgatttttaatggcgaatctgttggccaagtggcgtcacaaacactagaaagtatgctagcgattaatgacgtctcaacgaccccgattatccgccccgtctcaacgatggataaaaatgaaatcattgctgttgcgaaggatatcgacacgtacgaattatcaatcatgccatttgaagattgctgtacaatttttgcaccacccgcaccaaagacgcgtccacgtttagataaaacgcgtttctacgaaaagaatatcgacgttgaagcgttactagaacgctcattagctggcatcaaggttacggaaattaaagccggcgaccaattcttgaaccaagacgaagaaattatttcggaattactatagtttctgtattaaaagcctattgattgggcttttttttgtttactcaggtaagacactaataatatttttaatgctttattagcttctggtactttttctttatagggtggcttgattaccgtatatttttgatgtttaataaaattatactaagaaaaataatttttggaggtagttcaatggaattcgaaagcgcttactaaacgagacataataccataattacgttagataatattattagtagtgatgatttagaagttttacgaaaatacttaaaatgcccaactgaggggtgtactgctgacttaatctatgttgctgcatcaccgcacccatttttgagcgctaaaagtcataaaacatcaccacatgtaaaaaattgtcctcactttaaagaaaaaacggattctgtaaaggagaaagagcggtatcaaaaagttttagcagcatttgatgagcaggctatatcttcaaggttggatagtttaaaagatgatatgtttccaaacaggataaaacaagaaagagggaagcctaagaatcggaagaaaaaattagaaatgactgaacaaactgataccgatgcaggaattattgttgttgcaagttctgagggggaaattaatccagatgaaattaaaggtagaagagtaattaagggaaggattaccaaaaagaaattaacagagtttttacaagaagatgaaggcttaatttttaaagctgtagcacagttggatcatataaaaaaagaatcggatttttattacaattttatggttcatcaaatagatgggaaaaaagaagcgaacttaagacttacaaatagtttttttaaaaggaatattattggcattaatactcaattagattttcttatatctatgttagaagcaaaaatggatataaaaatagcttttactggtagatttgataattatgaatcttgtgaatttgagatattcgacgattatggttttaaattggggacaatagataaatctgttccaagattagattctttagtattattttacaacagatataataattaatagaaaatccttaaaactaaaacgccgattagtcatcggtgtcgtcatattcgttcgatccatcttacccaactcctaccaagggaatcttgaacgattccagctcttatgattttgatgttgaaaatgcatattgcggtcaatttgctcatcatacattttttgaccatcaatatttttggtaatcttcgttaataaccgttgtaattctgcgatttcactagctgataatcccgctaaaatatcttctgaaatgctatccgtttcagaattaccagtcgcaattacttggcggcctttgtccgttaaataaattaatgagacccgcttatcggcagccgaagcttgacgactcacgtacccctcttcttctaaccctttgacctgtaagctgaccgaactaggccgaatatcgagtaactcaacaatttcggcattcgtcaaaccatcttgttccgataataaattcaagaggcggtatttacctttggtattcgcaaaatcatgactccggcgtttgcccaacgtcatccaaaccgaggtcataaagtagcgagattgcattaattttgcaaataacatcatcgtttcttgtgtttcattagtcatctattaatcgcttctttctgaattagttagtttcaaatccgtttaacctaacgaaaattagtttaactcgttagttaggctgagtcaacaccaaactaactaaaatgccaaataaaaacaccaatcgctatgcgaccagtgtttaatagggatttaagctacgcgccagcgtttggtaatttgttgtgcgccaagacagctgatgagaataaaagggaagaattgaattgggaaaaggaataataagagtgtcgcagtgaccactgcttgttgcaaaatgacggtcacactagcggcgaccaccacgccgatgattaagcccggtgtatacggcatcaggttcgtcagaactaagccaatcccgacactcgcaaagatggccgggaaaattttacccccgcgccaaccaaacgcaaaacaaatgtgagttaacccgactttaccaagtgcaattactaagataacgactaaactcatctgactggcttgcgtcgtaaaatcgagtaacgcgtgttcccctgaaaataggaaatacggcgataacattcccataatcccaatcgcaccacctgctaatagcgctagcacaaccggttgtttaatccgctgcgctaaccattcagaccatttttcagtctttaagaagccataaccaaataagatgccaacgataaacgcggggattaacatcgcaaaggccagcggttgccaatcaacgttcggcacatgaatcgcaaagagtttttctttcggaaagagccgattcgtggcactgaatccgataatgccgatgagtgtcgtaatcgcgtacaaaccgaccttttgccatttcaccttaaacgttccttgacgtaaactatcatctagtggctgactcaaacccatgaaaggcgctttgaaaatggttgccaacatcgccccgatactgagactgactaattcttctttcttagccaacgtcagtttcatacgatcgcccaaccaactaattagaccacccaggatactcgataacgccgcttcaggtccgagactggcaccaaacgcgagtacaattacggccgtcacgaaatttttccaaatgcgctgatgataaaccactcgttgggttgctttaaactcacttaacgtttcatgcatcgttttcggataggcgcctaacttggtttgcgtccagcccactaaacaacccccgattaaaccgacaatcaacggatagtaatgcggtgcggcaatcgctgccggtaaactaacccaaatcaaatgaatcagaaaattaacgaacgctaagaatagcgccgaaacgacccccactaataaacccatgaccccacaataaccaataaaaatcgctttaaatcgcacgttgattccccgaatctttctattaatctttgggctgcatcaatgcatataacgcataagccccatctaaattctgaacttgataaccattttgtttcaaaatccgttccgctaaataactgcgcaagccactggcacaactaacaatatagtgattacttttaggtaattcgctcatgcgttgccgtaaatcatccaatggtatattgatagcccccggaatcgcgccttgctggtgttctgctggttcacgaacatcgaccagctgcgccccagccgccatcgcggccgctaattcgtgccattgtaccgactgactatcaccagccatcaagttttgcgccgcataacccgctaaattaataatatctttcgccgatccaaacggtggcgcgtaactcaattctaattcaggtaaatcatcgaccgttaaaccagctttaatcgcagtggctaaaacgtcaatccgcttatcaacaccatcgggaccgactgcttgcgcgccaaatagctcaccagtttgcggttggaaaagtagtttgagccaaatggtttcggcccccgggaaataaccagcgtggctttttccagaaagatgcaatacttgatacgtcagccccgctgcctgtaattgactttcatttaaaccggtactgccgcccgccatttcaaaaacacggacaattgcggtaccgagactcccgcgattcaaccggtttttaccggccaaaacatccgcaacttgtcgaccttggcgattggctggtgaagctaacgaaataagcgtgtcctgattagtcgtcgtttgtttgacaataatcgcatcgccaatcgcataaattagcggatcactcgtctgataatggtcattcacgattaaacccttgcgcaaacccagttgtaagcctgccgcgttcgccaactgggtcgcgggttgcaccccgaccgctaagatcgttaaatcactggccagtgtttgaccgtttgccaagaccaacgtctgcccagccgcttcgaaggccgtcaccgcattttccgttaaaaccgtcacgccgtgttgaacgagtgctcgttgcacaaacatcgccatttcaatgtcgaatgagggcaagacgtgcgtgccgcgttccacaatcgtcacttggagtccgcgattaaccagtgcctccgcgatttctaaaccaataaaaccagccccaatcacgactgccttttgactcgctttagcttgcgccaaaatttgatcgacatcggggacgttgcgcaacgtgtaaacgtgttgcgctgaatcgagaccctcaattgctgggactactggttgggcaccagtcgataaaatcaaccgatcgtaatgttcttgataagtcccttgcgcggttttaaccgtcaccgattgatcagttcgattaattgccgtgacttcactgttttgacgaatatcaagtttaaaccgtttagtgagttgggccgccgtcttgactaataagtcggaacgttcgctgatttcccctgctaaataatagggtaacccacaattcgcaaatgagacatagggccctttttccaatataataatctcagcctgttcatctaaccgtcttaaccgtgtggccgctgacataccgcccgcaacgccaccaattatcaaatacttcatcattatcgcctccatataactggatagtaaccgatttcacagattaatgctagccatttcgtagtatacttataatattcaatttaagactggagttttacggatgccacttaatttattattctcaatcgacgaccatttcgtccctcaatttaagacaacccttttttcaatcgtcgccaataccgccgcaactgatttagcggtttacgtcattcaaaaaaaccggctagtggcggatgacgacattcaccaattctgccagcaattcaatatcgcctattatccggtaattatcggtgaagacccgacttttaaagatgcccctgtgtctaaacgctatccggaagccatctattaccgattactggcccataaatacttaccccaggatttaactaagattctgtatttagatgcagatattttatgtatcaatgatttattaccactctataatttagacttaggcactgatttatacgccgcagccagtcacgcgagcttgaccaacatgccggacgtcgtcaataagattcgccttggcacatacgaagcggatggctatttcaattctggcgtgctcttgatgaacttacctttgattcgccaaacggtttctgaaaaagcgatttttgaccgattagcgatgcctttaaatcccttattgttgccagatcaggatgtcttaaacgcgttgtatggccaccaaatcctgaccattccggatgaagtctacaattacgacgttcgtaaacctgcgatttatgaagccatcagtcatggaacttgggacctcgattggctcgttcaaaataacgtctttctccatttttgtggtaaggaaaagccgtggctcccgagtgccaagaataaattcagcctactctacaaacattatcaacaccttgcaggccaatcttaatcccttattttttagtcgtcacaaagcgatacacgctatgcgcgccaatcactaaacacaataaactggttaaaaccgtcatcagttgaaactgccaaaacgtactgattaatccgatgacaccgattaagatgaataaaacaccaataatggcttgttgttgtttctttgagatcatttttaaacgctcctttaattacatcattgaacttactgtaccatatctttaccgaaactttaacgttcaactcaccaatgaccggtatactagaagagatagaccgattccggaaggactgattaaatgcgtaaaaatattatcacgattcacctcatcattttagtgttctttggtctcatcctattatgccaaagtcgctttaccttcttaatttggaatctcattttggccatcattccgtttgatttaagtttactttgtcatcgccaatcgcacctcaaacaacgctatttattcggaattgtttggttactcttcttccccaacgccttatacatgatgaccgatttcagccatctagcctccatcggcgtcggcctgagtaccccgacccaatttattgaatacgcgattctaactggcggggttttcttaggcgtcggcttaggcattttcagtttactgatgatgtatcctttgttcatccctaaaagccaattactctcccgccaaattgcgaccttcagcttgttgagtatttgttcatcaattgcgatttatttaggccgtttcttacggattaattcttgggatgtcttggttaatttacaccaaaccaccgttcaaattttgagtgttttcgaccaatatgaattctggattttcatcggcgccttctcaattctccaactgatgttgatgttagccagttatcaattacaaaaaatattgatgcagcaaccttaaaaaaagcctgactactggaatctatccagcggttaggcttttttacatctttaatttagccttccgcaaccaccaacaacgatttaatcgctgttcgttgatccattgcttgataggctttttggacatcggccaattcaaaccgttgtgtgaatacttttcctggattaatttgaccgctgaggactgcttcaagtaagacggctttatcataggtggtgactgacgcaatcccaccgcgtaacccaatatttcgccagaataattgattcgtattcatttcggctttttgtggtacacctacccgaccgactaatgcgccggggcggccaacttgaacagcggttgcgactgattgttcggtcccaacacattctaaaacagcatcggcccccgcctgttcagtcaattctaagacacgttgaacagcttcatcaccacgttcggccacaatgtcggtggccccaaattcgcgggctaagacttgccgatcagtatggcggctcattgcgataatccgggttgcgcctaataatttggccgcaatcaccccgcataaaccaaccgccccatcgcccatcacgacaacggtatcgccttgtttcacttcagcagtcactgccgcgtggtaaccggtcgccatgacatcagaaagagctagtaaagaattcaactgttcttcgttataatcactcggttgccctggaatcttaacgagcgcccaattcgcattcgtgaatcgtaaatattcaccttgataaccgccgttaccgccttcttcgcgatttgtacaattaccgtcaaaacccgcaagacaagctgcgcagtgaccgcaaccatgtgtgaatggtgcaatcacaaaatcgccaacttgaatatcagtaacctctgaaccaaccgattcaacaatcccaatcgcttcgtgccccaccaacgagttagccgcccgtttagcgagtccgcgataccaccataaatctgaaccacagacacaagcccgaatgactttgataatcgcgtcggttgttttttcaatttttggtttgggcgtttcttgtaattgaacctcacctggtttaacaaaaatagttgctttcatcattaacatctcctatcaattagttttcattttgtttttctgcggcccgtaattcttcttctgtcaccgctagatgatcttcataatggttaattttccaattcaaatgatcaatcgccgtttgtaaatcatcccgtttttcaatcatgatcgccatttgttcatttaataattttaattgttgcgccgtattattctcctgcgcgtcaaataatttgatataagcctttaaagcttcgatactcatcccagccgctcgcatcgttttgacaaagctgatacgacgaataatgcgttcatcgattgctcgaacgccaacttcattgcgatcaatcgccggaattaacccttctttttcataataacgaatcgttgtggcattgacacccgttttttgactggcttctttaatattcaattgattcactccttaaataggtcgattaattcctaaattttgatgaccaaactgggaatcgtccgcaatactgcgacacactaaatcagcaatcgcccagcgagaaacatcatgcccgccaaaaggtgtccctttaaccgttacttcataatcatgattaccttgatcaaaccaccccggtcgaataatcgtataattcaaaccactttgttcgacgatatcggctgcttggcgatacggttttagcgctggattaaactgaagattgccttcacgcccaattttaactggaatttcattatagattcccatcgaactaatcaaaattaatcgggaaacctgagcctgattcattgcagtcactacagtttcagcaatcggtggtaactggccactagctgaaatgacgacgacatcttgctgtgccatcacggccattaaatccggcaattgcgtggcatctccttgaacccaattaagccgttgatcgactggtttaggggtttgaatatgtctggctagtaaggtcaattcgacgtctggtttcgttaataactgtttaatcatctcagtcccgattgaaccagttgcaccaataatcaatattttagtcatttaatgtcgctcctttttatgagtgggcacaattaaaagcaaaactgctaatagtgctagaacaatcagtccagtcgctaaccacatcgcaacatgataactaactagtgcatttttaatattagcagatagtgccacaattaatgataacccaattgagccgccaatctgatggaccatattgactacgccagaagctgcaccagcatcggtagcatcagtgttagcgacacccgcaaccgtcaggggacttaacgtcaaaccttgaccaatccccatcaaaatcatgggcacagcaattccgattgcataaccaatttgaaccgtaaagaaccctaacaaactcatgccaatcgccgttgtactaatccctatcaacaataaacgcgtgttaccaaaacgagccgttaatttggcgacttgtaaagccacaacaaaattcataatcgttaatggaaagaacgctaaaccagctagcaacggcgtaaagcctaattgtgtttgcattaattgcggtgttaaaaaccacatgcttagcatagcacctaaataacaaaaacgcgcgatatagccacctagtcgttcaaagtcagtgaataagcgtagcggcatcattggggcggccgccttggcttctcgtagaataaaaccgccaatcatgaccactgcaagccctaaagcgactaaccgatattcggcacctaccaagctatacacgagtgctgtcatcccaatcatcgatgtgctggcccccacgacatctaaacgtttcgccttcgattttgtttgggttggaataaatttagctgttaataccagcatgattaaagcaatcggcacattgatgaaaaaaccgtcccgccatgataataaactagcgaatagaccaccaatcactaatcccaaactagcgccgattcctgcagtggcaccatatgcggcaatcgctttagtccgcgcttcaccactaaaatgatccatcaataatgccaaagtcgttggtgctagaattgcagaaccaattccttgaaaagcccgtgccaagataatcgtcaaagccccattagcaagtccaacgaatagtgagccgattgcaaaaataaatagcccaattgaaaaaatacgtttgcgaccaaaaatatcgcctaaactgccgcctaataataacaacccaccaaacgtgagtgaatacgcattactgacccatgataataaggttggacttaattttaaatccgctgctattctaaccgttcctgtaaaaataattgaattatctaataaaatcatgaaatagctaatcaagatgattgccaatatcattttttgattgtttttattcattataatcccgtcctctactttttcttaacaaaaagtattgtattccttaaagcggactttaaggcaagtgtttttttaaaattatttttttgctaaccttctttttcgatgcgcgccagaactcatcaatttccgttcaaatcaaaaatgccggttatccttaactctcgggataaccagcattttcaacttgatattcaattgataaccgaattctgtcatagcttatttaaccaatatcatgtttatgactcaaatataagcgtcttggtaaaatcaccgcaaaaccggcaattaaaatactgtacatcattgctggcggataaatggttgctgacaacaccatgcccaatagcttaatgcctaagtcaaaatagaaaatcggcatgtaatcggcaatctcttccttcagtgctttgttcttcggatccgctaaccgtaatgtctgataactaatcacgacacaaattgatacgagcatggcaataatcccataaataatctgtgcaaaactattattaaagttttgggcgacaatactcgttgtgtacggaaagaatgatgcgaaaaagagtaagcacatcatcaccgtgaccgtccgtgaactgatttgcgtcactctttcccacgtattatgaattcccatccacatcgcccctaaccataagaaagataacgtataggcaaagaaattcggtgctaacgcgactaatccttgccagttcaattcttgtggtttctctaattctaaaattaaaattgtcataataattgctaaaacagcgtcgaaaaaagctgccaatcgttctttattcatctatcttttctcctacatagcgtataatttagtccattaacttaattatacgcttacaggttgctgattagaattaacgatttagatatttttttaataaaccggacgatctaatccttgtgtctctggatcggctagtcccaaactatccttggttccataatcagggtttgcgataattttcaagactaagtccgcaacactttgacgcgaccctgatacgccgacgaagggttcattgcaggtggttacactgtatttaatttcgtcacggtcatttaaccagggcaagcgtaatgtcgtataggctaaacccgattttgatagtagttgatctgcgtgaatcgcagcttggaggccactttcgaccattgataagttccaacgaccaaattctcctggcacttcgccataaatccctaagatattcgtgctaatcacgcgagtaaccccgttagcctgcatcgcttgaatcacatgcttagtcatggcattcgtcacgccatgatccacgaccgcaatgtacacgaaatcttgcccgatcatcacccggttgatcaacgattcatccgtcaaatcaccttcgactatcgtcacccgcggattatccgctaacaccgctaaccgacttgcttgtcgtaacaccaacgtcaattcaatctctttaaaagtggattccgttaaaattcgattgctcacaatccgggcaatctgaccattggctgctaatactaataatttcatctctaaaacccccactaatttaagttagccttagtttaaaccttggagtgcactttatagcaagtgctttagctaaaaaaataaaacccatctgcctgataaagggcagatagattttatcgaataacatcaactaactgaatccctaaaagtactaatgcggatagaatcgacaaactattaaatagcagatgggccaatgttggtacccagaaattcttacttattaaatagcttaacgagagaatcacgccggcaatcacatacggcatcgtcgcaattaagctcccattaaagttataataatgactgaatccaaagagtaaactagaaacaatcaccatgattccggtcaataatttccccttagatttgaagacgtacatggactcatgacggtaagctaactcttcaacaaaagcggccactaaatcacccagaccgcctacaattccccacaacgttcccacgattgtcaccgttgaaaattcatattgcacaataccagccgacttagccgatggtataaattgatggaaataaagatttgcgaccgtaacagccacttccaaaagaaccaaaacaatcacaacgtagagtatattacgccatttattctttgcaaactcgtgccattgggcggcaacataaccaccaaatagttttaagttaaagaataacaagaaaataaaccagagtgatgcaattgttaaataaatgacgccactgtttccggcaacttggcgagctagcgttagaaccgctaacatcccaccaaagttaattagtatcgaaagccagaatttctttgtaaaagtgcctttagtcacgttgtctcctcctaatcaatcacatattctaaaataaaggttgtactcaattatataataaaaatataattatatctataataagacctctgagcctatcgttatattcttaaggacttggcggacacctgtcaatttctaaaaaatcgctattcgttggcattcttaagtcattaccaacagcgaccgacagttataacagctaaaaaaagaccttcaccaaatcgtgaacatcttttaagttatcgctatttttttgttctaaaaatcccgactaacgtttttaagcccattaccgcaaacaccatcagcccagcaaacaggaaagcaaaaccaatcggtaacaaatagaaattctcgtgtaaaagcccagttgaatcgacatactctactgaattacccttaatcagaaaacaaacaacgccgagaattaagagaaaagcgccaatcagtaccgttattaagttaaacttcgcgcgtctggtttcacgaccatctttaattagtttttcagtcatattattcacatgcgttcctcctaaaattaattcatcaagtgacaggttaaaaatagtcgctatcagaatcaccatttctaagtccggtaaatttcgattattctcccaatttgaaacagcttgcctagtcacattgatgcgaaccgcgaactgcgcctgagtcagctgttgcgcagttcgaatctttttcagttgttcaccaaattccatatctgataccgcctttctcgctttatttttagcatacccgataccgcttcgattgccaagacagccgtccttgcctttggctaattactggacacagttgcttgcaaagctgttatctcagccaattagtatccattactgatgttgctaacaaatagtctggcctctatttcccaggacatcattttagacacacacctctacaacacacaatttttccgagtgatatttaataaccttttagattataagtgtataatcatgatacatcccccataattgtcattagccaaactttacataaaggcgtccagcgctattcagaatcatcaggtgttgggcaagttagtcgctaagttctagcaaaaaagagcgctcacaagaaatgtgggcgctctttttaagattaaatctcttttattcacttttttaggtgtcctacaaatttagtttcttaatgcgttttcccttcaaccgtcataacatctgcttgtccatcacgtgcgacaatcgctgataatgctgcactaatgcctctaacatcgtctgccaaagataatgaaggtgtctctggacgactagtcacctgttcaggtaagaatggaatatgcataaaaccagccttaatctgtggaaattctttatcccgcatatactgcacttgatacataatatggttgcaaacatacgtgcctgcggtattggaaacctcggctggcaagccagcctcgcgaattgcttgagccatcgccttaacgggtagctgtgtaaagtaagccgtttggccgtcttcatgaatcgtatgattgaaaggctggtagccagcattatcttcaattcggccgtcatctaaattaatcgcaatccgttctggggttaaagcaaagcgtccacctgcttgtccaatatttaagacataatcaggttgatgttgttcgattgcatcgtgaacagcttgggctgaaacattaaatttcgttgggatctctagcttaataatttccgcgccactaatttcatcaggtagttgtttaactgcttcaattgcaggattaatcaggtcatccccaaatgggtcaaaaccagttactaaaattttcatctaaaaacttcccttctatttttaaaaagcaagcagatacattaaggcaatttgaatcactaacagagtaaccgcaatcggggcttgctgtttgataaccgccatctgatctttaatttccattagcgcaaccggtaagctattaaagttagcagccatcggtgtgattaaagtcccacaatatccagatgtcatcccgattgcagcaacaactgccgggttcccaccttggacaacaacaaatgggatcccaatggcagcagttatgacggcaaatgccgcaaatccattacccataatagctgtaaagatggccatcgcaacacaatatagaatgacaccacctaagtgatttcctgcaggaaaaatatcagcgattaatttggctgtcaacgtcccgacgccagcgatggtaaataccgcgcctagcgttgctaaaagttgaggtaaaacgccagccgtgccaatcgaacgcaccatcctttgcgtgtcatgataaacctgacgaccagaagacctagttagtattaaggcgagtaaaaacgaggtgattgcgccaataccaataccaacttgcccacctaaattagtaaactgagtgatgcaaatcgagaccatcgcgagcacgatactgggtataaaaatcaatagccctaacttctgtgcgccggctgcggcttgcttagggtttacttgagtcacggaaccaacacggatttgtttaaataacgctagtaagccaataattacaattagaatcccgatcactaaactcggaatgaggtcagcaaaagcaaaaataatcgccatcaagctccaaaagagccccgttccaatacgcgctggattagtttgatcacgaaatgattcgatttcttgaaaaaaccgttcatttaattggataattaaacaaatattatcttggttcgttcgtttcatcccgtggactaatttaggattaatgaacactaattccccttcattaaacaaccattcagtctttcccaactttatttccaaagtgccctttaacaccaatataaattcaccgtcataatgccaatgcatactagaataatcaatcgacgtgataaagattttggccggaaaagtttggtaagacattttttcaaaaagatagttgctcatcgatagcctccttccgaagcaaacgcttacatttattgtagaccactttatgttatcttgtttttaaaaacagtcatcttgtctcccgttttaggacattcccaaatcgtttaatttataaaatcaaaataaaaaaacttcccctacaaagagaagtttttcactctagtccttaaaataataacgcgttaattctagcgcactattatccatgacttgttgaccatattccttcaaaaaatcagccgtatagggcgttttctgtccaaattcattagcgaccgctaaatcatcttgtaagaaggtttcggttgtattttctaaaaagaaaattaactgtgcatagtattggtgttgataaacaaataaattagaaacaccactttcaatccgtaactgttgggctaacgctatccaatcatcgaacgatttaaagtgcaacacaatttggcgcgttggattatcagcttgcttcagataattcatcgtttcatcatcatcgtcatccgctgattgatcatcacccgtatctcgtttaagcaactgttttttgatgtattctgtaatgccgtcttgaccttgcaccatttcagaatcggaatgggcttcaacttgtccaaaattagggagattcttactaattaataactctaagccctcgtcatttggtaagacttgaaaagtaaccgcctcgttattagcaaaggcgtggtcttgatcgacttcttccaaaattgaatagaagaaacgttcaatttttttatgattacttaatagatcaagcccggtaatcccacgttcttccaaatcgtcattttcaagcaggactcgaattgtgttatcatcgattttttccatcttcatgggccatcgcccctttctactactgtctgattcacgcaaacagtcattgattgtactttgctttaccataccagtatcgctaacaacattcaagtctagcgattattctttaatcaataaccattaaaaaaagcagactatccctcaacaggataacctacctttcaaccttgatccgcaactaatgaccatgtccttatcaacagcgacttagaagcctgccattaattgagcttgttgtaattccaatgcacgaacttcacgtggcaagaaacgacgaatttcatcttcattgtaacccacttgtaaacgtttctcatcaagaataattggccggcgtaataaaccagggttttcttgaaccaagtctaataattcattaactgataaatcatcaattttaatattcaattcttggaaaatcttcgaacgtgttgaaatgatttcttcagtaccgtcttcagtcattcgtaaaatcgttttaatttcgtttttattgagagggtccgaaaaaatattgcgttctttaaatggaatgtcatgttcctttaaccacgcccgggctttacgacaagatgtacaacttggtgatgtgtataatgtaaccatatgtctctctccttttctaccatggaagcgcctacgtttcgtattcgttccattctctcttacaaaatctattatacgcgattaagtatctaaaaactagtctttcttaaaaataaattaatcgttttccaataaactttaattaacaaaattaaaataaacgtctaattaaagcgtttaatatcgacattatagaactgagatgcaatttttactgttttatatttatcaatacaatcattttattattatcattaattattattctaatgaaattgcacttattttttgtaagttctgtatatcactatcttacgtcaggcaatttcaattgtcaatccttgtttcgcaacttgaattggcaagttcggcaagaccgcttgtgcctgttctagaagcgttgcggccgttgcggtttggggtaaatgagttaacaataattgtttaacttgactgtcttcagccaaagccgcggactgggtcgtcgtcatgtgggccattttaccggttttatcttgtaagaagttcgtatccgtcatcagtagatcagcctgttgggcgaaattggcaagttcagggaaataagccgtatccgcagtaaagactaatactttactagtcgacacttcttcaatccgcgtcgcaaatgcgggcactggatgaatcgttcgtttaaaagtgattttaaacggtccgactgtcaatacggtatcctcttgatacccgaatccctgcgtgacacccggcaaggttaaactaccaaaatgtaacggatcttgtaaatgaccatagattggtaaaatcggttcttttttgacaccttggtgcaattgccaataatattgtaatacccctaaatcagcgatgtgatcgtgatggtaatgcgtcaataatacggcatctaattgcaatggttctaagaccttttcgagtgccagtagtgcaccactcccacaatctaataacaaatgataatcaccactcgttaataagtaactgcttgtgccgacaccgttgtaaggataaccaccataataacctaagacttgtaattgcataatactcaactcctcttctacggtctatcatagcttatattagccacattgagtatggccttaattgatttttaccaatatttaacgcaaaaaaatcgttatggctaataatactagccgataacgatttcagttttactaactaattattgaatgacttgaatccgatcttttttgatgtcttgataaaacagtgtgacactcataatcagataaggatagaaccacaagaaaccgatccccgcggttaaataaacgacgatttcccaaccgatgaacgataacaccagtcctaataaccgcaaccagtgcccttttaaaatcaccgttgataacgataatatcattttaattgaagcttgtggaaattcaaatttcaacaacactagaatttggtaatacgctaagatgattggttgaattaacgtaatcactaataaaacaagtaaaaaggtcagcaccaagaaataattggctggctgttgactcagcttcatgagataaggtgctgccgatgttaaaccgttgtagctgaagtttaacacgcgttgccaaccaatcagttgataaaatgggattaaaccaatcagtaataatccccagtttaagacttgttgaattaagtttaaaatcactaaatccgtatagaatggctttttgaataacggggtgatggcgttgatgcctttcgtcttgtggtaacttaatttcaaagtcgctaagaaaaccgcgtttagaaaaacaaaatagaagaaataactcgcaaaagtatcccccatttgataccaaaatgtattagctccaaagagaccttcaagtcccgcatcaagtagcatcgtaatcagtaaccaccacgccaccatggtcgccagttgttgccaatgtccttttaataaaagtcgcgcttgtgttcgataagtctttaattgcacagaaatgcctccggtttaatagtgcgtatcttcatacaacggtcgattgacgatacgattatagattttagcagtgagtaaataaaacatgagataaatcataatgaaaatcccacaaacaatatacaccaattgtaacccgggattatctaaaaataaactcaataatcgaatcgcaaaaatggcgtgtagggttccgagaataatcggtaataaaaagatcatcagaatctggaaataaatcgaatgtttgatttcagccatactcatcccgatttttttcaacgtttgatattgtaagatttcttcttgggcttctgagagctgtttcaacataataatactcccggtcgctagcatgaagattaaggcaattaaaatcatgatatatagatagaagccaaaattggcgttggccaatgcctgattgggctttttaatcagcacttcattacgggtatcacctgtttggtgcggttttttaatggttaatcgataatgatcaatccgcttgcccttctcagtcaccagataagcttgtttcttagccgtctgcgtgtatttcaataacgccgccatgaacggtttattctgttgatctttcttggttaaattcaccgtgtggatctgatcggtaacatccgcttgaatccgttgatactgagcatccgcaacgacgaccatattctgaattgattcaaaataaattgcggggccgttaggaaataatttacgcactcgaatgacctctaaatgggttaatccagattgatataaatttaacggcgtatgatcacgctgtacaggttttagcgccttactacggggtattttcaacatggtcagtggcatatcaacaatcgctacggcttcttgcggttctaaatgcgtcgccggacgatcaaactgactcgccatcatctgattatattgagataaactaatcaccgtcgtggccccgttttgttggtacccatcttgaagtaatggactgtttaatttaaaattacccgcaataattttataatcaatgaccgttttggacttcggtgtcacgtgatagcgcgccattaaggcttcaacatccgatttttgtaattgcgtataaattaaatcagccggaatattttgcttcaactgactttgaccatacgtgtagatcatcgccgtactcccaattgccgtaatcgtaaccgcgcttaaaatcgtgatcatccataatgttttagcatttttacgaaagcgataactgagattagaaacacttaatagatgtgttccccgataatacagccgtttccaacgccgttcaaattgtaaccagatttgaatataagattgaaaaaaggctaaagtcccaataatttcgaatagcagtatcgctaataggtagaaaagatccgcttcatagccaaattggcgttccatcattggcatcaaggtaaaaatcttttccgctaaataatagccgccagcaatgagcgcgattccgatggtcccccacagataggtccaaccagtcggatgtttcatctttttagccatccgagttggatgtaataaatcaactagtcggtatctaaaaattaacgtactgtttaaaaaaccaatcattagaaacaaaaagccaaacgtgccggttgtctgccggatcgccttccacgaaatcagaaacggcatcgccacggcaattcccatcattcgcaataataacatcgcgaataattttgataaaaaaacacctaataatagaccaattaaaatggcaatcaagccaatgattaaactttcaccaaaaaaaagaaaactaatctgtaatttggtcacaccgataacgcttaaaatcccgatttcttgtttccgtttcttcacaaagaaaagattcgcatacgccagaaaaaaaataacaaataacaggatgataatccttgctacaccaatcgttccaccaaatataagacgttcaccagccgttttcaaatgggtgagtaccgggtccgtttcaattgagatgaaacagaaatacacgacaatcgctgccacacaagcaattagataagcagcatagtcccgagcccggttcatcgcatttttaaaggtcagtcttaacagcattatagcgacctcccccaccaatcgtggcctgcatatcaataatctgattaaagaactgttggcgatcaccgctccgtactatttcggcaaataactggccatccttgatgaacaggattcgccggcaataactggcggtgaacgcatcgtgggtcaccaacaaaatcgtcgtcttctcttgctggttaatctccgttaaatacaacaataactccgttgccgcctttgagtctaaactacctgtcggttcatccgctagcaacaacgccggattagtaatcatcgcgcgcccgcacgcgactcgttgccgctgtccgattgatacttcttctggatagcgttccaataaaccgctaattccgagaattcgactgactttatttaatcgcgattcaatcactgcaacacttaatttatccaacgctaagggtaataaaatgttttcccgaatcgttaatgaattcaataaattaaaatcttggaagatgaagcctaaatcttgccgacgaaaattggctaatttcgcttcgcgcatcttggtcacttcttggtttttaatcaacactcgaccgtgtgttggccgatcaatcgtcgcaatcatgtttaacaacgtcgtcttgcccgcaccggatgggcccatgataccgacaaattcaccgggttcaatctcgaatgaaatatcattgagcgcgttgacaacgttcagtcgatgaccgtaaaccttagaaatatgttgaaccgaaactactgccatgttttaagcgctccttttaatttagtttcttatattctagcaaaattctgggcaaaaacccaccatccacttatcagaccttagacggttgtcttttgacactaaaatcggtattatgaatttaattatgcttaaggagcgatttaaaatgtttgaaattatgattgttgaagatgatcaaacgattgctaatttaattgccgagaatttagaaaaatggcaattaaaagccatcttacccaaagattttaacgctatttttgaccaattcctcacggataaaccccatttaatcttattagacattaatttaccggtttatgacggcttttactggtgccaaaaaattcgtgaagtttcaaaagtgcccatcatctttatctccagccgtaataccaacatggatatggtgatgtcgatgaacatgggtggcgatgatttcgtcaataaaccattctctatggaagtcctgattgctaaaatcaatgcgcttttacgccggacctacaactatgttgatcaaaataccgacgtcattgaacataacggtttattgatcaatctgcaaagcggtggcgcacaagttggcgaaatcacgattgatttatccaaaaatgaatataaactactccaatttttaatgcgccaacacggacaaattgtcagccgcgagaaattactacgcgcgctttgggatgatgaacggtttgtcgatgacaacaccctgaccgtcaatattaaccgccttcgtaaaaaaattgaacaagccgggctcgatgattatattcaaactaaaattggccaaggctatatcatcccctaaggagcaatcatgaccttaaaaaaatttattcgcgaccatttgttccacatcgtttttttctttggcggcatgttcgtgctcgacgtcgttttatggcttgatccgagtatgcgttttgccaaatcaacgttactttatctcgatttcttactgacgattttcttttgcgcctttatcatcggtctttatctctaccaccttaaatggtaccgcgcaattcagattcggatgcacgcccaagaagatggtctcaattggccgttaactggcgcaacttccgctgaaaagcagttcatccaagactacgtcaatcaactcctcgattatcatcaacaaagtatcgaacgcttgattcacacgcaacaagaccaaaaagccttcatcgatagctgggtccacgaaattaaagtgcctttagccgccacgcaattactcgtcgattccgttgaaatgcaaattcccgacgaaaaattcaatcaactgaccgaagaactcgttcgcatcgaacattacgttgaacaagtgctctactattcccgactggatagtttttcaaaggattatctggttcaagaaaccgcattaaaacccgttatcaatcaagttattcgccagaacagtcactatttcattcagaaaaagctccattttgaattaaccggagatcaacaaaccgtgttgacggacgctaaatggctgagcttcattctgaatcaaattatctccaatgcgattaaatataccccggatgacgggcaaatcaagattagtctccaccacgatgcgctcggtgtttggctagatatccacgattccgggattggcatcccggccgccgatctaccccgaatttttgataaaggttttactggtcaaaacggacgcttatcaaatcgcaattcaaccggattaggcttatacctcgccaaggaactcagtttaaaactcgggcatgaactctatgttgaatcaacggttgacaccggcaccacttttaaaattctgtttccctttctaagttattataatgatccggacagtgaccaactattcggtaaaaatacaaagtcctaaaaaaacagcgcctaactcctttcggaattagacgctgctttttcgtgttgtggtaatgttactttaagcttcttcttttaatgacattgaagtcgcaattttaacaaatggaatgtagattaaggttgaaacgagtaagttgacggcggctaaaaccccaccttgccagctgaccgttgcaatgacaccgccgataattggtggtgtcacccaaggtggcataaccgttgcagccggcaccattccagatttagtggcaaagtaggcgattgaaacaatcaccattggtgtcaaaatatatggaatgaataaaactggatttaagacgattggcaaaccaaatgtcaatggttcgttaatgttgaaaatcccaggtgctgcactcaagttaccgacgattgagtattgtttgttcttacgaccgactaaccaaatcgcaaagattagaccaagtgttgccccagtcccacctaagttaacaaatgaatcgaagaaaggtttgttaacgatgtaaggtgctgctttaccagctttgatagcagcaatgttggctgtaatcgctggtgcattaattgtttgcataaatggttcgatcatgttggcaccatgtaacccgaagaaccagaggaatggtgtaatgaaggctaataataatgctgaaggatagctgttagcaagcccttggaatggttcttgaacggctttatagaatgacgtcacaatattttcaacgccaaagcctaatagaattgttgcgaataatgagaagacagcgattgtaatcattgaaggcaataaagccgcgaatgattgtgcaactgctggcggtaccccatctggcatcttgatgaccaaatgtttgttacccaataaacgacgtagcatttcagttgagatcatcgcaacgattaacgctacgaacaagcccattgaatccatgccagctaaaccaccaacggcgaagaacgacgcaagtgaagtgacaccagctgccaatgggttgatcttgtaagacttacccaaattataagcaactaagaatacgatgaagactgataagatggcgaacgtgccgctccacgcgttaccaccaaacttcgtccaaatgtaagctttgtctgcaccggtacctgttgtctttgaaaaaagaccgttcataaaattggtatatgccggtattggtagattattaagcaacgttgcaaacgcgcctaaaatcattagtggcatcgttgtgacgaaagcgtcacggatggcgattaaatgtcgctgattacctaccttagcggcaattggcaagaagcgtttctccatgaaactgataaatgaatccattaaacatcactccctatcttatctatttaaagataaatgattgctattacacttactatcataccgagctcggaaagcgctgtcaaacataaaatcctcttgttaagggattacactttttttcacaatccaaccaaaaaagcgtcaatctccgactaacggggattgacgctactttatatattgctatggtatataccaatatattttctatgaaaataaatttttttattatttatcctttgcaaatcattttcaacggactaatttatcccaaatgaccacttcgccacttgccaatgatttttgcacatcgataatccgttgatttttgctgcctctaaattgcaacgttaaatccatttgatcttgcatgaaacgaccatcaactaaaatatcgattttagataatagttctaatttgtcatcagactccaacatcaattcatcccaagtataaccagtccacgaccagacatctttggtatggccgaaattggcccgaatacggttcactaatgataagcaagtagccgtatttaaaaacggttcaccgccaagtaaggtcagaccttgtacataagattgacctaaatcagccataatctgatcctcgagctcggttgtgtaggctttgccgtatttaaaattctgcgcaatccggttatagcatccgggacaagcaaataaacagccactgacgtataaactacaacgcaccccttcaccatcgacgaaattaaagggtttgtagtcggcaacgtaattttgacttaattcagatgaaagccattcttgtggttcgggatttttgggtcctcgtttaactgtcattttctaaaacgcctctctaatcagaaaaatcgccatcacggcgattttcttaaacttttttattgtctagcaagatcgttattatcgttaccaacagtgatgtgcatgtgtttcacacgactggcaatttctttatgccgaccgtgaaccattggccgttgttgtggattacctaagtaaccacaagtccgtttaaccacgtcacaagtcgcaggatccgtattaccacattgtgggcattggaaaccccgttcagttggtttaaaatcgcctttaaaaccacatttgaaacattgatcaattggcgtgttcgtccctaaataaccgacccgatcatacgcataatcccaaaccgcttctaacgcttttggattttgacgtaaattagggtattcgcaataatggataaaaccacctgaacaatatttaggataatctttttcgaaatctaatttttcaaacggtgttggtgccttacgaacatcgtaatggaaactattggtgtagtattccttatccgtaatgttttcaacaatcccgaatttttgcgtatctttttgacagaacgtattcgttagactttcagctggtgtgctataaactgagaaatggtaaccgtattccgttgaccagtccacacaatggttatataagtctttgaccacttttagtgtaaagtctttagcagttgcatccttttcccaattggcgccaaagaaggccgcgccgacttcgtagaggccgatatacccaagagaaactgtggcgcgtgaattcttgaagacttcatcaacactatcggttttctttaaacgtttgccgaacgcgccatattgatacagaatcggtgcgttttcgggttttgcttctttggcacgttcaaccttgaagaccaaggcttctttacaaacttgtagacgttgttctaggatttcccagaacttagcttgatcaccagccgcttcaagggcgatccgcggtagattaaccgtcacaacgcccaagttcatccgaccactattgacctcttcattttgttcatttttccaaccttgtaagaaactccgacaacccataggtgctttaaatgagcctgtcagttcaattagcttgtcatacatgagaacgtcgggatacatccgtttcgtcgcacagtcgaccgctagttgcttaatatcgtaattaggatcggttgggtttaagtttaaacctcgtttgattgaaaaaactaacttaggaaagattgccgtccgtttttcttggcctaaaccaccaattcgaatttgcaagatggctttttgaatggcccgttcgatccagttgctgcctaacccaaaaccaagggttgtgaaaggcgtttggccttgtgatgaataaagagtattaatttcatattcaagagcttgcatagcatcataaatgtctttttcagttttagcttgtgcgtaatcatgttgcttgtctgcaccttcgacccattgtttggcgtcgatcatgtgtttatcataatttttttgagcaaatggggctaataattcatcaacccgatcggcagaacaaccaccgtattggcttgaagcaacgttcgcaataatttgtgacatttgcgccgttgcggtttgaatggaatgtggtggttcaacttcagcattgccaatcttgaaaccatggtttaacatttcgttaaaatcaattaaacagcagttggtcattgggctgtatggttgataatccaaatcgtgccaatgaatttcgcctttcaaatgcgcattagccaccttagaaggtaacatcttcaagcccatcgctttagcgaccgtgcccgctgttaaatcgcgttgtgtattgaacacttgactatctttattggcgttttcgttcaccacagtttgatcttttttcaataatttttgaatggtgaaattaatatcggtcgctttatttcgtgaaaaatcgcgttgtgtccgataattgatatattcttgggcaaaatcatattgatgatgttctaataaagtgtgttcaacgatattttgaatttcataaatcttgatatctttatcaaagcgatttttaatttcagcaaccacatcgttagcgactgaattcaagatttgataatctaacggttcaagttctcttttgacgttcttggccgccttaataatggcttgttcaatcttctcagctgaaaaaggtaagattcggccatcccgtttgatcactttaatcgctaaaatattgtttgcatctgacatttcacgcatttctaacatcaacaatttccccttttaaaaaattactatccccatcatagcgaaataaaaaaagacaatcaactatatgtggtgtattttccaaataaaaaggtggacaacaactatctgttgtatccacctaattgtgtgcaattttttcttttgcccgtcgttgtcccgttctaatcagacagtcctaaaaaagaattgacttatttcgttttcgtgatttttaaagtcatcgcattaaccgccacaacgactgtcgagagtgacattaaaacggcccccactgcaggacttaaaattaaaccgataccggcgaataaaccagcggccaatgggattgcgacgatgttataacccgctccccaccaaaggttttgtttcatcttacgattcgtgacccgcgccaagttcaagaaattaatgatatcgtgtggattgctcttaacgagtacaacatccgctgaatcaaccgcgacgtcagtgcccgcaccgattgcaatgccaatatcggcccgcgtcagactcggcgcatcgttgaccccatcaccaaccatcatgacaacttgcccttttgcttggtaatcttgaataattcgttctttatcttccggttttaaattagcctggaagtcgatgccaccaagttgttcagctaccttagcggccacttgctggttatcgccagtcaacatcaccggctgaatacgacgctttttcaaggcttgaataaaagtaacggcctccggtttcaattgatctccttgggcgactaatcctaaaaccgtttgattctggagcaaatagctgaccgaattccccatttgagctaatgcatcaaattgtgattggtcaaaagcgattttttgttgcagtaaataagtcgccgttacaatttggtaactttgctgatcaatcgtacccgttaaacccacaccttgaatcgtttgtacctcatcggccgataaactagtgattgaatgcgactgattatacgtcataataccagttgctaacggatgacttgaatggctttccaaagcgccgaaaagttgcatcaagcgtgtttcatctaagtgttcatcaaaaactttaatcgcgttaattttaaagtcgccttgggttaaagtccccgtcttatccatcaaaatagtcgtgacctgatccgccgtttctaaagcttggcgattccgaatcagtaacccgttggtggccgcaatcgatgtactccgggcaacgaccaacggaatcgctaaccctaatgcgtggggacaagcgataatgaagaccgtcaccattcgttcaaaggcggtatttaaatcagccaagaacaaccaactgataaacgcgatgatgccgaccactaatgccgcgtaaaagagataactggcgactttatccgccaaactggcgactttagattgatcctgctgagcctgtttaatcaatttcatgacttgggccagataaccactctcaccagtcccggtgattcggacggttaaggtgccatcaccgttaaccgttccaccaatcacttggtcgccactggttttagcaacggccttagcctcaccagtcaccaaggcttcgttgacctgactctccccggcgatgattaacccatcagctggcactttttcaccagctggcaccaagacggtttgaccgattgataaagtttgcaatggcaccgttcgttgtcgcccatcagtatcaataacccgcgcttgacctggtaagagcgccgccatcttctctaaagcactaccggcactcatcacagcgttcatttcaatccagtgacctaataacataatcacgatcaaggttgctaattcccagaaaaaatccatcacatgcgtcgttgaatgtccaaaatgattggccataaaagcgtacaagctatagccatacgacacgctaatccccatggcaatcaacgtcatcatcgctggttgacgttcggctaattcgcttttggcccccttcaaaaaaggcgcaccgccgtaaaagaataaaaaagttgccagtactaatactagccaatcagaccccgtaaaagtcatttgaaatgggagtcgaatacccatcattggcgataaaataataatcggcaccgcggcgaccaatgataaccaaaatttttgtttcaagttgcccatatgcatcatttggccaccgtgcatcatcatatcctcatcgtgctctgaatcgtccatctgcatatgatccatattcatgtgatccatattcatgtgatccatgtcgtgacctgtttcgtgttcattcatcttcattaaatgtccctcctattcacaatcacaattagccggcaaacaattacaagccactttaaccggtgccgttttcaatttggtcgccaacaccgtttgtaactgttcaatatccgtttgacttaaagtcgttgtttcaactagattagccaacgtttggccttttttcatttcacatagatggtcaaataaaccttgcgtagcatgatccatcgcatcgacttccgctacagttgcggtatagctaaaccgccgaccttctttagtggctgttaaataaccttttttcactaatcgaccaatcaacgttttgattgttgagtcttgccaatcccgtttttgttgtaagatatcgattaaatcacgactattaaccgcccctaacgaccaaatcacgcgcatgacttcccattcagaagctgtaatttcattatctggcatttcatcactctctttcgtttacacttgtagatttattataagttcagtttaacccgtcaccaatagcttgtcaattaatatgacgccacaaaaaaagaccccctaaaaataggcggtcttcaaagttaaacgattatagattactcatgtaatcttcaactaatttttgattttcttcattacttgtattcacgttgacagctgtttcaactaaatcagctaattcagttgtgtctaaacgtttcatcaagctccgaacgcgtaatactgaagtggcactcattgagaattcatctaagcccattccgacaaggagtggtgccatgattgaatctccggctgcttcaccacacataccagtccacttgccttctttatgagaagcgtcaatgacgttcttcacaagacgtaagattgctggattgtaaggttggtataagtatgaaacacgttcgttcatgcgatcggcagccattgtgtattgaatcaagtcattggtcccgatactgaagaaatcaacttctttagcaaattggttagccaatacggcactggcaggaatttccaccatcatcccaacttgtaaatcatctgaaacggcttgaccgttagcaattaattttgctttttcttcttcgagaatccctttagcttgacggaattcagcaacagttgcaatcattgggaacataatccgtaacttaccatagttagaggcacgtaataaagcgcgtaactgcgttctaaagatatcatcacgatctaaactaatccgaattgctcggtagcctaaaaacggattcatttcttcaggaagtggtaagtaaggtaatttcttgtccccaccaatgtccattgtccggacaacgactggcttgccgctcataccttctagaactgctttataggcttcaaactgatcgtcttcactaggcaattcagctgaatccatatataagaattctgtacggtacaaaccaattgcttcagagccgttatcaacaacaccctctaaatctttaggtgtgccaatattagcagcaactgtaaaggctttgccgtcttttgtcacagatttttcgttctttagtttttcccattccgttttttgagctgcaaaatcttttgctttcgcatcgtattcagcaacatcggctgcggttggatctaaaacaaccacaccgttgataccgtcgacgattaattcttcgccagcttcaacagcacttgtgattgtttcagtcccaacaatcgctgggatttctaaagaacgcgccataatcgcagaatgtgatgtccgtccaccaatatcagtcacaaaagccttcacgaatttaccattcaattgggctgtgtcactaggtgttaagtcatgcgcaatcacgattacttcttcatcaattaatgctgggttagggagtgttacccctaatagatgactgagaacgcgcttagtgacatctttgatgtcagcagcccgttcttgcatgtatgcgttatcagtcatagcctcaaaagtggccacaaataaatctgcgacctctttcaaagcttgctcagcattaaccttgtcatctttgattttaccttcaattgcaccggtaaattcagggtctgctaaaatcatcatatgtgcgtcgaaaacttgcgcttcttcttcacctaatgattcagcagcaatcttccgaatgatctttaaatcatccgtggaatcttgtaaggccttatgcaaacgattaatctctttttctgaatccgtaatggttgatttcgaaaatgacaaatcgggttgcactaacatgtaggctttcgcagttgcgattccgtcacttgcagcgatcccttgaagtcttgtcattattcagataaaccttcctttttcattgtttcttcgattgcgttgatagcatcagcttcgtcagcaccttcagcagaaatagtaacgtctgcaccttgaccaacaccaagagacataacgcccatgattgatttcaagttaacagatttacctttatattctaagtttacatctgagttaaatttgcttgctgtttgtaccaataatgtagctggacgagcgtggatacctgtgtctgctactacgtgaaaatcgcgtttttccatgttaatcgatccccttttatctatacagatttatttttttaacgaaatggctgacccaaatagtagcgtcaccctttcgatagttaagattaccattttttgaaaaatactacaactgtttcgccaacaaaattaatcacagtctaaacgataccgctttcagacgctcgataaatcacccgcccatttcgttgtgcaaacccaacaatttcttttcgatgattataattaacccagactttctgaaaatcaagaaactcggttttctcaacaataatctcatctttttcgtgatttagtagggcattcatctctgctaaaaaatctctttgcatactcacacctcacatcttattattttcattagttatttccatcatcattttcattcagatgacacctaaaccaatttttattgtactgaaattagcgacctaaataaagtttttattttcaagtaagattacttgcaactttttttagcgatgcttataattcatttaaaggtcaaagatagtcaaatacactttgatcatcaaattgataagaaaggtcgtgacagtctgatgctttgtcaaaattgtcagcaaaatccggcaacaatccatctctatacgagtaccaatggccaacgccaggccattaatttatgtcaaaactgttatcaactcttaaaacaacaagacggcgctaaccaccccactggtagttatgccgatccgtttggttttggtaacctcgatgacttatttaaagccatgggggcaacgcctaatgaacaagtaacgcccaatcaagggcctcaaacccaagccggtggtcacaacggtggccgcaatggtcaaaatggcgaaagcttattgagtcaatatggggttaacttaaccaacctcgccaaagggggccaaatcgaccccgttatcggtcgtgataaagaaatcgcacgcgtgattgaaattctcaaccggcgcactaaaaataatccggtcttgattggtgaagccggcgtgggtaaaaccgcagtggtcgaaggcctagcgcaaaaaattgcggatggcgatgtcccaactaagttacaagaccgccaagtcatccgactagacgtggtttctttagtccaaggaaccggtattcgtggtcaatttgaacaacggatgcaacaattaataactgaattgaaacaaaacaaacaatacattctcttcattgatgaaattcacgaaattgtcggtgctggtaacgctgaaggtggtatggacgccggcaacgttttgaaacccgctttagcgcgtggtgaacttcaattagtgggtgcaaccactaataatgaataccgccaaatcgaaaaagatgccgcactcgcccgtcgtttgcaaccggtcgccgtcaacgaaccgaccgttgatgaaacggttcaaattcttaaaggattacaggaaaagtatgaaagttatcatcacgttcattatacggatgaatccctgcaagccgcagcaatgctttctaaccgctacatccaagaccgctttttacccgataaggccattgatttattggatgaggctggttccaaaaagaatttaacgattactgtcgtggatcctaaagtcttggaagataagattaaaacagctgaggtcgccaaacaaacggcgctcaaagaagaagactacgaaaaggccgccttctatcgcgatcaagttaataaactgactaaaatgcgcgacacagacagccctgatgaatcacaggaaccgacaattactgaaaaagatatggaaaaaattgttgaagaaaagacgcatatccccgttggtgaattgaaagcccaggaacaagcacaactgaaaaatctagcaacagatttagaaagtcacgtcattggtcaagactctgcagtcgataaagtcgcccgttcgattcgccgtaatcggattggttttaataagtctggtcgcccaattggctccttcctcttcgtcggtccaaccggagtcggcaaaaccgaattagcgaaacagattgctcaagaactttttggcagtcccgattcaatgattcgctttgatatgagtgaatacatggagaaattcagtgtctcaaaactgattggttcaccgcctggctacgtcggctatgaagaagctggtcaattgacggaacaagttcggcgtaatccgtatagtttagtgttattagatgaaattgaaaaagcccatccagacgtgatgcacatgttcctccaaattttggatgatggtcgtttaaccgattcacaaggccgtaccgtcagctttaaagatacgattattatcatgacttccaacgcgggtcaaaccgatgccgaagccaacgttggttttggggccgcggcatctggccaaacccattcaattttgaatcaacttcaaaattactttaaaccagaatttttaaaccgctttgacgacatcatcgaattccaagctttaagtaaagaaagcctgttaaagattgtgtcgctcatgattaacgaaacaaacggtatgattgccgaccaaggactccacatcgacgtcacggatgcggttaaaacacgattagtcgatctcggttataatcccgaaatgggggcgcggccactccgtcgagtgattcaagaacaaattgaagaccgagttgccgattattatttagaccatcccgatcacaaacaattggtcgcacaactgacgaatgatcacattcaaattacagaagtgccaactgccacggtctaatctaaatggtaatttctttaagaaacggttaaaaatacttcatatttaatactaaacacatgctaaatgaaacgttttcagctatactaaggttaagacttaaagattaaggagtgatttaaatgcgattagttaatattacaaattcatataaacggctcgttgcacaacaattagcaacgactgcagcagattacgttaaggtttattctcttggtaaaacaaccgtactttatactcgttcttcaaagtcatccgaaattcttatagaaaataaggtgcgcaatgtccaacaaaatgaaattgattttgttctcgaaaaattagcgaaccgaactgccagcagtgacgacttaacaattttgaatgatgggcagctcgttgaaattacaattccaaccccatctttaacgtcagcatagctagtcaaaacaagctgtgacagaaatcggttatcaattgagtatcaagttgaataaggtggttatcccgaactaaggataaccaccttattcaacttgaacggaaattgatgagttctggcgcgcgtcgaagaagaatattgacctaatatcagactgctaagacttatgtcacggccccgtttttgtgtgccattttatgacttatggttaacctactacatttatctcgaattcctactgtttatcacgtcttatttcgtaaaattatgatagactgttaataatgaataacgttttacaaggagttcttatgaatctaattagtttgcttcaatcgttatttaaaaaacgaccgaaaccggtcgttcatcaacagccagtccaagcaactcggccagaacccaccacctcatccgttgaccaacccgttaacgatgatttttttgacgtccctgagcaatcggcaacaccgattgcagtcgcgccccaacctaaaatttgccatgcaacaatccattatttagatgaacataatcaaccgctacgctcccccattaatttaaccgggaacgagcacactgcgattcatctcccttggttaaaatttacgggttattatttagccaatattcataacttacaacaaaatttcgatcaatcgccgattacaatctggttaacttatttacctaaaatggcagcgcccgtttttgtcattcatcgtaatctcgatggtggccccctagtcaaaccacaactattacgcggtgccctaaacgaaccttatcaagccaaaccgtttgacggcggcgtcaatttcgtgcaacacgtttccgctaaccaaacgggtcattttcaagaaaaaacccagaccgttgtttttgaatatgaccccttaaatttaaaatacgccgacactgacgacgtccgctacatccaattattagccagtacaccggtttatgaaaagtccagtcaagaaaccaagctcaccactcagttacccaaacattcaatctggcggctctttgggaccgccacaacgacggccggcacgtgttggtataacttaggtgggtattggattttaccgactgaacatgaattattagccaccaatccctatctcaaacaaacttaccaagtgccaccacagtttaatctcgattatcaaaccattacggctgaagatgtcacgctccaaggacatatcttaggctcgactgtcactttatggcaagcaccttatattggcccggttcggtgtcaactgcaagaacaacgagctgttaatctgattcaagtcgttattttagataatcacagtcgttggtatgaactcagcaatcattattgggttctcgcatcattagtcacggttgatgatgcttaaactcagcgtatcaaaaacacaagctgtgacagaactcggttatcaactgagtatcaatttgaaaagtcgcctatcccaacaaggatagacgactttttgatttgaacggaaattgatgagttctggcgcgtgtcaaaaaaataatgttcgtttaatatcagaatacgacttatgtcacaatccttcttttttagatcatgctatctcaagcaaacctttccgcttaactacagaagggcaatcatggtcagttcaccataattgcccttcttaggttatgctcaaggtttaaccgcttgaaatagcacttctatccttaacgtgctttctcaagtagccttttccggttaactacgaatcgggtatcatgagtaaaaaacactcataacacccgattctaggttaatcctcaaagcctaaccaacttgagtcagcacttctatccttaacgtgctcattctcacagcttcctgtgcttagcgacgtctggcaaacaaagtccataacccagactttattcaccagactaggctaatgctcagaagctcccgtgagaattcgcacttctatctttaacgtgcttctgaactagcttcttccgtctagctacaaatcaggtatcatgactaagaccgtcataattcctgattttaggctatactcagaagctgaccagttcagccagcacttctatagttttgctgttaattctacttctgggtacttgtctgcaaaccagcgttctgcaaatttattttcgaataggaacaatggtgcgtcgttgatgtctttgaccaatagattacgggatgatgacatcttttcgtctaattgatctggattaatccaacgagccgttcttgagccgattggttccatgatgacttctgaattatattcgtgttgcatccggtattggaagacttcgaattgtaattgaccgactgcgcctaaaatataatcgctggttgtataagttttatataactgaatggcgccttcttgaaccagttgttgaatccctttatggaatgacttctgtttcataacgtttttagccgtgacgcgcataaagagttctggtgtaaattgtggtaatttttcaaatgagatcgcctctttaccggcgtaaatggtatccccaatttggaaattccccgtatcatacaacccaacgatatcaccagctacggcactcgtaacttgttcacgcgtatcagccataaattcggttgaattatttaaacgcatttttttaccagtccgtgttagcgtaatatcgatgccccgttggaattcgccggaacaaattcggacaaacgcaattcgatcccgatgagccgggttcatattggcttgaatcttaaagatgaaacctgaaaaatcaggtgaagtcggcgtgatttcggtcgcttcttgggtcagatgcgcttctggttgaggcgccatatcgacaaatgattctaagaaagtcttgaccccaaaattagtcaaagctgaaccgaagaagattggtgtttggtccccagtcgcaatcttagcgggatcataggcatttcccgcttcaccgattaattcgatgtcatcaagtgcttgggtgtacactgaatcttcttttaacgggttgtcaccagcaatgcgaccagcttcatctaatgctaaatagggttcttcaacatctgtaggccgataaatttcgatccgcttcttagtaatatcgtaaagaccacgtaaatctttacccatcccgattggccagttcatcgcacaaccttcgatatccaataattcttccagttcagcgattaaatcaaggggttcgcgaccatctcgatccaatttattcatgaacgtaaagattggaatcccacgcattttgcagaccttaaataacttcttagtctggggttcaatccctttagcggaatcaatcaccatgacagccgcatcaacagccatcaacgtccgataagtatcttcggagaaatcttcatgccctggggtgtccaaaatattaatccgtttaccggcatagtcgaattgcatgacagaactcgtgaccgaaatcccacgttgtttttcaatttccatccaatcggatttggcgaactgaccactctttttacctttaacggttccggcttgccgaatcacgcccccgaataaaagtaattgttcggtaatcgttgttttcccggcatcgggatgtgaaataattgcgaaagtacggcgacgttgcaccgctgttgttaattctgttggtgtcattactgagtcctttcttttgtgccaaaaataagtcagccacttaggcctaaaacaaccaggccacgtatccctattggattcaataacctggttggcttcaatctttttaattattacaacaactaaaccagtgtttccgattcagtctgttcgggcagctttaattttaaatcgattaatcgtgaacccgctacggtcccagtcgttaaaatcagtccgtttggtaaatcaatcgattcgggatgaccgctgactggaatcgcaccaatttcggtaatcacaaaaccagcaatcgtatcgacatcggtcacttgaatatcggtgccaaaagcatcattaaaatcatcaattggcatccgacccatcactgaataatggtgttcatcaattttttgatagagtttttcagcttgatcagattcatcatcaatttcgccgacaatctcttcaagtaaatcttcaatcgttgctaacccaaccacaccaccatattcatcgaacaaaatggccatttgttgttgcgtttttttcatttcaaataataaatcatcaatcgtaattgtttcgggtacgaataatggcgcctgcatcaccgtttcgatttgcatactttggaaaccggtttgccgcgcttcttttaataggttcttgatgtgcacaatcccaatcacttgatccttatcttcacgataaacgggaatccttgaaaatggttgcgctaaaatggcatcaatattttgattatcatcatcttgaatatcgaccataaacgcatcggttctaggcaccatgacttcacgggccatcttcttattcaagctaataatcccttctagcatctcatattcgtctgattctaatacaccagcactcttactcgattcaatcatgtggaccatttcttcacgggtaaattgcggtttggtctcggaaaaatcaatcggtgttaatttcatcaacagattggttgacatcgataataaccagacaaacggccgtaatagaacccccaccaatcgaatcggttgcacggccattttggcaatcacttccgcccggtgtaaggcgacttgttttggataaagttcaccaaacacgagtgagaaataggacaagataatcgtcacaatcacaactgacgcttcatgcgtccaagcagcatcccctaatagcggtgctagtttgctcgcaatcgtcgtggcagcactcgctgatgataagaaaccagcgaacgtaattgcgacttgaatggtcgctaagaaatggttggaatggtttaacacatccaataataacttggccttcttatcgccattttcggcttgattctccagcttggtgcgacttagtgaaacaaccgcaatctccgctgccgcaaaaaaagcattgattaacgttaaaatcaggatcaacagtaactgtccccaaatcgaacttccagggtcaggattcatcggcacatccactacctttcattttacaaatttatataagtcacaaaggacctagtatgcagtatagcatagtcaattttagaaattcaataccggctacagtttactggcatcttttgctttatttcgtaattgattaatatcatatagataaacaacgaccgttttagtcaccgcataaaacggaatcgctaaaatcatgcctaagattccgtaaatattgcccgcaactaataacaaaataataatcgtcaacggatgaatatcaagtgagcgaccaatgacgtttggataaattagatttccgtcaatttgttgcacaatcacaacaaccacgattaccatgatcgtcttgggaatcgagattgataagccaataatcaacgctggcgcaatcccgatatagggtcctaaataggggatgatgttggaaacaccggcaataaatccgagtagatacgcgtatggcatgccaatcattaaataaccaataaacgtaaagacgccgacgaataaacattcaagcgcttgtccaccgatataagctgaaattgtggcccccatcttacgtaataaatcagcgacctgttgattgtagcgttcgggcaacattttttggatggttggtactaaatggtgaccatcttttaacatataaaagagcataattggcactgtgaaaacgccgattgtgacgctagtaatggcaccaatcatactaccaaaactactcgtaaaactcttcatgatgttttcagcaatcttacccggttttaaatcgagttgattgatgtacttattaaaatcaatatttttaaggtgcggattttgaaccaaatcattacccaactcttgtagctttttagcaaaatctggtaaattcgtcactaactgagcgacttgattaacgagattcgggatgaccgtggccacgataaagatgatcccgccaaaaaagacgataaagataatggcaatcgcccaattacgcgacacctttaacttacctaacaatttgatgagcggattaaacaagtagaacaataatcccgccccaataatcgggccaaataacgttgagataaaagtcccaattggatcaaatagaaaactaatcttcgtacagacgaaaatcaacacagcgacgattaaaagttcaattgaccaaaacattaattttgaatgacgtaaacgatcaaacataacattctccttcacagttggcgttctcgaaatccataacattttatgctatgatgatgccaatattattttcattgtaccaaattttaattcaaactaacatgattaacaacagggggttaatttttatggacatcaagcagacaactgatttatcaagtcctacctatcgagacgcattaaacatccgtcaaaccgtttttgtggtggaacaacaagtccccgccgaacttgaaattgatgcctttgagaatcaagcccgctattttgtcggctacgatcaagggcaaccagtcgccactttacgtttgattgatgaagggcacgcctatcacgttcaacgcgtggctgtcgccaaaacggcccggcatcgtggttatggccaattattaatgcagtccgcggccgacttcgccgaaaaagtcggtaaacaatcacttatcttaaacgcgcaactaactgccttaccgttctatcagaaattaggctttcacgcgaccgccacgccaacatttgtcgaggctggaattgagcaccaagaaatggccaagtcttttaaaaacgactcaaatagcttataataaacgtctaaagtgaggtcattaatatgtcgaaacaaaaatcaatcttaattaatctattttttctaatgattccctatctactaaccattatgattgccgccatcgcgtatgatagtttggtcatccacagcaacacatgggatcgcaccatttttggtggcatcgttgctagtatcctactatattttgttaaaatgcccgtcgaacgccctttaaccatcatcaacgatttaacgcccagtttaatccttaaaaaattaaccgcgcttttcttgattggtgattcgactttcaaaaaaatcggcactttcatcatcgatttcgtgctcttttgcgtcggcacgtacttaattcgccatttcctaccactccccttcatctccggatcattcctaggttggtgcgtcgccgccctgttcatctcagtcacaattggcttcagcataggcttcaacgacttaacaatccaacaagacacatcggtagaaaacgattaagtgctaactaccgatggtcaagttttgagcattagcctagtctggtgaataaagtccggtctatggactttgtttgccagacgtagctaagcacaaaaacttatcggtagaagcacgttatgatcgaagtgctgaactcacgggtagcttctgagcattagcctagttccgtgaataaaggcgggttatgcctttgtttgcgaaacgtagctaagcacaggaagctgtgagtgcaagcacgttacgattgaagtgtctgactcaatttgattaggatttgagtattaaccagaaaaggactacttgggttagcgcgctcatcttcccacaaaaaataacccccgcttttgcggaggttatttttgtttggataagactaaatagggttctaacggtggtgcgataactcctggtaacggttataccaaatatcaatatattcctttgaaaaaggtcccttaccagtgttgatccaatcaaccaaaattttgacattggctttcaatatccgatcagtctcggcagagtaatgccacttggcgctgtgcgcttcgtattcatcaacatccaacaagcgtttctcaccatttggaaaaaccttcacatctagatcataatcaatgtatttcaaagcttcttgatctaagacattcggtgatgccaaattgcagtaatacgaaacgccgccttcgcgaatcatagccacaacgttaaaccaatactttttgtggaaataaataagtgccggctcccgagtaacccactttctgccgtctgattctgtaactaaggtatgatcgttacaaccaatcaccgcgttctcgctggtttttaaaaccatcgtatcccgccatgtccggtgtaaactcccatcgtgtttataactttgaatcgctatatagtcgccttctttaggaacattcatcgcgcaacccagctttccaaggttatgattcataatcacctatcattatagcaaagtctgcttaatatacctaaaactttctaccgttaattggtcttaaagcgcgccattaatttcttttgaacggtcggtaacgcaaccgtctgtaaagcgtcctctgaataccattgccctgggaaaaaagccaaatcaacatcagccactaattctgcttgtaataattcaatcgtccactttaagtgggtaaaggtgtggacaactggtttcagatttgttggccgtaattgttgcaacgtgattgcgtaagtctcctgaaaatagcgttcaatataggtcaaaatttcttctggcgtcaggacttcatcttccggtaaaatatcagccggcacgactaatggataggtggttaaattcgccaataaccccgtactcggtcgtttctgtaataaaacgccctgcggtgactgaataatcaccgccattaacgcgactggtttaggccgttgctttttagtcttaaccggataatcgagtaacgttccgtcttgataacttctaaaaaaaggtgctaaatccgtctcaccaaccgtcggattcttagcggtgcaaacttgtgaaccaaaatccatgaccgcttgattgaaatcacccggtcgatcctgcggtattaacggtaaaatggcgtcataaaaaatttgacgattcttcggattagcgatgtcggcatcaatctttaatagtcgactgaagacccgaaacgcattgccatcaattgctggcacgacttcaccaaaacaaatactggcaatcgcgccggcggtataaggcccaatccccgccaatttttctaactcaacggatgtttgcggccattgaccttgataatcatcgacaatctggcgcgctgctttttgtaaattacgagcccgcgaataatagccgagcccctcccacgttttcaaaagtaactcttctggcgcagccgctaaatcaaccacagtagggaaagtcgctaaaaaacgttcataatacggaatcaccgtttggacttgggtttgttgtaacataatttccgacaaccagacccgatacggttcttgattcaaccgccaaggcaactcccgacgatgaacgtcataccacgccataaaagttgtttgaaacgcttgaatctcactagtcgtcatctgataaggcttgttcgtcaatgaatcggttgatggcatcaatattgaatcccttccgataaagtgcttgttgcatcttcatccgtcgttcttgtggttcgagtagtcggtaccgacgccattttttgagacccagcgtctttagtgcgtcctcttcatcatccggatcagcttctaaagctaaagcctcgataattagacttaaatcatccccagaaaagcctttttgcattaagccttgtttaatcttttgttgttgttcaaaaaaggaggaatggcggtacttcttagccagcttctgagcggccgctaaaccgacttcggcccgatcatcagcggtgtaaagggttaaagcttgatcgatttgtggccccttgacccctttttgaatcagcttttggcgaatgactttcggccctttatcgcccgtgtgcataacggttcgcacataactatcggcataatcttggtcatcgatgtaatgcagttcccgtaatttagccagactatgttcaatgccatccggcgtaatttcgtgttcctgtaaatattgccgcaattctttttcagtccgtaattgccgacttaaataattcagcgctaattgataagctttagcgtcatcgtcgtctttttgaatatcgcgttgtaaggtggcatccatttcgagtcccttagccaaccgatatttaatcagaacactttcagtgacgccaaatgcaaaggcctcatcgataaaaatgttgtagcgccctttttgtttctgtgacgaaattttagtgattttaggcataggccactcctatttcttgttttggcgagttgctttgacgtttaaataaatcttgaagccaatcacgatgactgccaggattagcgtcaaaataatcatcattaaatctttttcttgaaaagcatagaccccgatagctaaaaccacgaccatcgcaattaaaaattgattccgttctaaaaaattcattgatgtactccttttaatttactgcttgtagcatagcataaatgcgaaaatccgacaaaaaatgccgcctacgcgtttaaagctgttataatagaagtcattcaattcaaatcataggagctaattaaatgccacaaccaacaaccaacaatgaagtcgcagccggtcaacgttttccattaacgattaaacgaatcggtattaacggagaagggatcggttattacaaacgcaagattgttttcatccccggtgccctacctgaagaagtcgtcgtggccgaagtcaccaacgtggccccccgtttcatcgatgctaaggtgcataaaatccgtaaaatggcacccaaccgcgttgaacccaaagacgcgacttacggtcaagtcggcggcattgaactggaacatctcaactaccctggccaattagccttcaaaaaagacgtggtcgttcaagccctcgaaaaattcaagcccaacggttacgcccaataccacattactgaaacggtcgggatggccaatccttggcattatcgcaataaagctcaattccaagtgcgtgaaatcgatggtcagctagcagctggtctctacgcaccaagtagccacactttaatcgacttgcctgaatttgcaacgcaaaccgacctaacgatgcacattatccgcaccgtccttaaactagtcgaagcactcgggattcccgtttatgatgaacaacacaacgctggtattttgaaaacaatcgttgttcgtgaatccttcgaaaccggtcaagcgcaattaacgttgattaccaattcgcaaaaactccctaaaaaacaagccttaatcaccgcgattcaagaacaattacccgaagtcgtttcaatcatgcaaaacgttaacaaaggtaaaaccgtcatggtttggggcgatgaaacaattcatctagccggccaagaaacgattactgaaaccttaaacggtattcatttcgaactaacggcgcgagctttcttccaattaaatcccaaacaaacggccaagatgtacgaaatggtcgaagatgcactcgatttaaacagcaatgatcgcttagtcgatgcttattgtggtgtcggtacaatcggtttaagtttggctaaccaagtcgccgaagtccgcgggatggatacgattccggattcaatcgaagccgcaaaacacaacgcagctattaatcagattgaaaacaccgaatattttgttggcgcggccgaagaactcttgccccaatggttaaacgatggtttccaaccaactgctttggtcgttgatccccctcgtactggtttggatcaacaattaatcgatgcgattttattaagtctcccagctaagtttgtttacgtttcatgtaacccatcaaccttagcccgtgatttaaaacaactcacatcccgttatcaagtggaacaaatccaaccattggatatgttcccccaaacggcccgcgttgaagcagtcgtgacattaacgttaaaatagagcaataaaaataacgaccttttgtaggtcgttatttttgtgctattttttccgtaaaaagaaagtcaccaacggattatcactcttcgtgattagtgaatcggtttttaaaactgaaacgacaaacaagaaaaccccgattaaagccgcgatcaacgaccatgagcgcacttgtaaaccctgactagcacgtgatgccaatgtgttaaagagccacagtacaacgacgccccgtccgtttaaaccaacatctcgataacgacgcatgctcatcgctaatgtgggaatcactaatgcaatcgttaaaactgcaaaaattaatagtaatccaatactgctggtttgcggtaaactcattttcagcatcatcgccattactaagcggcccatcaagtaaaagaaaggaatgaaccaaatgattaatagaatcagcatgacccaccaataaccgctccgcgtcgtttgaccgacaaaatcaaaataacctttaaaataatcacgtaacgcctgtttaaacgtcactttttgcgttgtcccattcattaaagaaccctccaaaaaaattaataccttaattgtaccgcactagcgaccatctttggtacaattaaaccagttaaatggaggatgattttatgaaaatttattttgcgaatgctttattctcacaagccgattttgaatacaatacccgcttagtcgctgagttacgtcaagccgacccgactttatcaatttatctcccacaagaaaatgcggcaattaacgataagaacgcctacgccaatgccgaaatgatcgcccaggcggataccgaacaactaaccgctagcgatttagtgattgcgattctcgatggtccaacaattgacgtcggggtcgccagtgaaattggggtcgcttttgcgaaacagattccaatcatcggtctttacaccgacagccgtcaacaaggcgcgactaacactcaaaaaattgcggccttacaacaaatcgctgagaaccaattccactatctaaacctctataccgtcggcttaatcaagagcaacggggcgattgtcaattcaaccgatgctttaattaaagccattcaagaacaaactcattaaataataaatcgtccagaccacagtaagcaattgcgggtctggattttttaacatcaaaaaaggaattcaagttatcgttcacttgaattcccctacgttgtagaaaatagcttggtgtgacactgatgtcgctgtttcgaattcttaatacttacacctcaatttatgctattcaattgtaattaatcgttcatctagcttactgttatcgaataatccgatctgatttggtctaatgaccctgctatacagcttcagcgattacgattaacgttgcgtttattacctgagtgatatactgtgacggacatcagcctccgatatatttgatgatgatttatacttctagcgtgttgcacttaagttggcactgggcccactcccttacaaactcttttccgtattgattgttcttgaccatttaccaaatatctatctgtggtacgacagctgattgttatcaatcaactgctattactttaaagctaacttgatttactttaaccaaccaagctatctttctacacccttaatataccaccttatgtaatcggttacaacttaaacgctcataaattttaaaaagaattttattctaaaaaatcagcctctgaataccgctattacagtatttagagactgttctttatttattaattaaatggttaaactaatttttttaacgacttttataacgtgcttctcaagtagccttttccggttaacgacgattagcaaacaaagtctataacccggactttattcacggaattacgctaatgctcagaaactacccgtgagttcagcacttcgattttaacgcgcttctgagttgcaacaacttccgcttaatctaaaataaccgataatcgggtctatactttctggtgttggtagaaatattctaccgacaccttttttgtcttttcgtacaaaaaaagcttaacgcctgaatccttagattctgtcgttaaactttttcgattagattattttgtctttgttttgatataagcgacggcatccgcaactgttgcgattttttcagcttcttcatctgggatttcggcaccaaatgtgtcttccaattccaaaacgaattcaacaacatcaattgaatcagcgtctaggtcttttttaaaatttaattcgttagtaatttgatctttatttaattcaaaacgatcgacaataatatccgcaatcttatcaaagatttcttgttcattcatgttaaaacctccaaaaattgaaacactttcgtacctaagcattatcggtattcagtgattatacctaactttctaggccgtttcaagtaaactgttttagcccgcgaagtccattgtagtccctttgactcagcttgtctagctaattatttagtttcgtctgcgacctttttttgatcgaaataatcaatcactttttggaccgtttgattggccaacatcgtatgaatttgtttgaccgtataatagacggtttgcgcatcagcggctccgtgcgccttgatgacgggggcttttaagcctaataaaacagcgccaccgtaaatcgaggtatcgaacttagttttaatttgaccgacgctgccttttaataaaagtccgccgatcttttctttaacgcccgcatccataatcgcgtgtttaacttgcgacatcacgatggttgcagttccttcaatcgcctttaaagtcgcgttgccggtaaaaccgtcagtcacaacgacatccgctaagccttttaatagatcattggcttcaatattcccgatgaagttcaaatcaggatcatccgctagtaattgatgggctgctttgtgtaactcatcacccttgctcgcttcagttccgttgttcaatagcgcaatccgcggattcgcaattccacggacatcttgcgcgtagaaattacccatcaaaccgtattgatgtaaatgttctggtttcgcttcggcattcgcaccaacgtctaacatgttaaagccatcttctgaattaatggaaggcagcgtgggcatcaaccctggccgatcaatgcctttgacccgaccaatgatgaataatccggctgccaacaacgccccagtattgcctaatgagaataacgcgtcggcttcgccagctttaaccgcttgggcggctaggaccattgaggcttgtttcttacggcgaatcgcacgcactggttcatcatcaccagcaatcttttcagtcgtgtgaacgattgacagttgcgccatatcaggtaggagtggtttaatctgggcttcatcaccgtataaaataaaatcaaggtctttaaattctgaacgcgcctgtaaaaccccttcaatcactgcttgtggcgcaaaatcgccgcccattgcatcaactgcaattttcatatcaattcctcttttcatcactaatctaatgttaaataattttgttgttgttgcgctaggtattgcttcaaagttggatagttggtcaaatcaggatcggtggtaaaaatcttttgaaccgcttgttgggccacttgcagactcgcgaaatcagcaatcggatcgccgaccttaaaagtcggtacgcctgattgttgatgaccaaagacttcccctggtccccgcaactctaaatctttttgagccacaacgaacccgtcattggtttcggtcataatcgtcatccgatcgatgccctgttgatttttaggatcggcaaccagcaaacaataggcttgtttcttgccccgtccaacccggccgcgtaattgatggagctgcgccaaaccaaaacggtcggcatcaaaaattaacatgacggttgcattcggtacatcaaccccaacttcgacgacggtcgtcgaaaccaataattgaatctgattctctgagaaagccgtcataatccggttcttctcatcatctttcaacttgccatggagcaaagcaacttggtagtccggcgcaaaccgttcggatagtttggcgtaaatttcttccgcatttttaagatccatctgttctgattcagcaattaacggcgtaatcgcaaagacttgggaatgttgggctaattgcgtgccgacaaagctcaacgcctgttcaacttggttactccgcacccaactggtttcaattggaactcggcccttcggtaattcatcgattgttgaaacatccatctcaccgtacgcggtaattgccaaagtccgtggaatgggggtggcagtcatcgctaagacgtccggttgtaaccctttttcacgcagaatccggcgttggttgacgccgaaacgatgttgttcatcaatcaccgcaaaacccaaccgttgataattaaccgcatcttgaatcaacgcgtgggtgccgacgatgatgttgattcggccattctcaatatcggctaataatggccggcgttctttagccgtgattgacccggtcaataaaccgaccgtgacgttcatcggcgcaaataattgctttaatttttgataatgttgttccgctaagatttcagtgggcaccattaacgccgcttggtagccggccgtaaccgccgcaaacatcgtaatggctgcgacaatcgttttcccagaaccaacatcgccttgtagtaaacggttcatgtgcgtgggcgattttaaatctaaacaaatttcgttgaccacccgtttttgggccgcggttaattcaaatggtaacgtctggataaattcttttaacgctgcgttctgataatgcagtgccaagccgttagcgacatggcgttccgattgcttaatcgattgtaattgtaattgatataagaagaattcgtgaaaaatggccgttcgtcgtgcttgtttagcttccggataagtttctggaaaatgcatccccgcaattagggcttgttcgttgactaacttgtactgctggcgtaatgcctcaggaattaattccggaataaccgcttgatacttctcgtaggcttctttaatcagtttaaccaatgtgccttgttggacacttttattcaccgaataaatcgccgcaaacgacgggttatcggccgattggaccgctaagaccttcatcccagttaacgtatgtcgttttgcatcccatttgccataaatggcgacatcgacgccggtttcaaatttatccttcaaatacggttgattgaaaaacgtcaccatcacgacatcgtgttcaactaagatccggacgtttagacgcgttttaccggggccccagcgactaatcactggttcggcaacaacggtcccttttaaagtcactttttcctgatcggcagcttcggccaaatccttgacctttaaatcctcataacggaagggaaaatagtacagtaaatcacttatattctggatacccagttgaccaagcgcggttaagcgtttggggccaaccccagttaactcagtgactgaatcggttaactgcaacatgtcattccctcctttttagcaaaaaacaggaatcaggtcatcatcctcattcctgtttttatttagattaagttattcaactgagattaggtatggataaacgggttgatgaccttcatgaatttcaacttccaattcatcgtcaatcgccataaccgcatcactaatttgttcagcttcagtttgatcgccatcggcacccacaataatcgtgacaatttcactatcgtcatccaacatggcttcaaccatttgaatggctgcatcgagtcgttcggttgttgaaactttgattttgccgtcgataatgcccatgtaatcatcttttttaatttcaaggccgtctaacgttgtgtcccgaatcgattgcgtgacctggccactaatgaccgtatctagcgcttcggtcatcgccgcttggttatcttcgatttcagcagacgggtcaaacgataacaacgcggtcatcccttgtgcaatcgtccgactcttaacaatttcgaccggaatttcagccacttcagccgcttgttcagctgccaagaaaatatttttgttattagggagtaaaataacccgtttggcattagctgcggcaatcgcatccaaaatatcttgggtacttggattcatggtttgaccaccactcaagatataagttgcgcctagacttctaaataattcagaaataccagaccccgcggcaatcgcaataatcccataatcgacgggtgctgatttttgggccacagcagcttgttgatcattgtccacaatggttgcgtgttgaagacgcatgttgtcgactttaatcttcatcaatgaaccgaaatgttggccgtaagccattaccgtgcccggatgttccgtatgcacatggactttgacgacttcttcatcggccaccacgagcagtgaatcaccgacaccgtctaaatggttccggaattcatcataatcaaactcgcggtcaacggttgtcccgtcgcctaaagcgaccatgatttcggtacaatagccattttcgatatcttcggtgcccatttgagccgtttgatgatgattggcgttgaccatttcatccatctcagcttcatcaggcgtgtataaatctttttcaggcgcttgtccggttaaaccttctaagaaaccttcatagatgaagactaacccttggccaccagaatccacgacgccgacttcttttaagactggcaataattcaggcgtttttaggagcgcttttttagacccttcaacgacggcagcaaccacttcaccgatatcatcggtttgactagccactttggcccccgctttggcgccttcacgtgcaacggttagaattgtcccttcaacgggtttcatcaccgctttatacgctgtttgaaccccactggtgaacgcttcagataaatcctgagctgacaatgtcgttttttcttccatactcttcgaaaagccacggaagatttgtgaactaatgacccctgagttaccccgagcgcccattaaaaggcctttggctaaactctttgaaagttcaccaactgcttgattgctattttcattaacggccttcgcaccgctttggaacgttaaactcatattggtcccagtatcaccatctggcactggaaagacgtttaaagaattgacaaattctacatttttagttaatcgatgggcagcaacccgcatcattgcttggaactctgttgctgtaatttcagtgactttcacgaatgttcctcctcgaacaaaaacaaatagaactggtttgattcaccagctcctgattgattttagtcttctaatacgcgtacaccttgaacatagatattaacggagttggcgctgacgcccaacatcgtttcaagattatacttcactttactttgaacgttacgacaaacttctgagatcttaatcccataaccaagaatgatataaacgtcaatcgcaacaccgttatcttcttgacggacaacgaccccacggttataattttcacggtttaatatttcatttaaattgtcacgaatctgatttttacttgccatgccgacgatgccatagatatcagtagcggcaccaccaacgatagttgcaatgacattattggtaatatcgatatcgccatattgcgttttaattttaacagccatcaaaatagcctccttgtgacgtacttattatcattttagcatagcagactggtgttgcaaagtaactcgccaataaattccgtttcatttggcttacgctagtatcttacaatcaacgtaattctgcaagtaaaatcgccctttttttaccctgtcaagtaattttccttgaaagaactcttgcaatctatcaaccgttatggtaaattatttaagtgaattgtataagccggtgtgcatgcatgcaactattaagactaactgaaaatcatattatgtttctcgttaattctaccggctttactaaaaggaggaataagaccatggcaaaagacgttattaccggccgtaaaacatcatttggcaacaagcgttcacacgctttgaactcatctcgtcgttcttggaagccaaatttacaaaaagtacgtatcttagttgatggcaaacctaaacgtgtttgggtttctgcccgtgctttgaaatcaggcaaagtaactcgcgtttaatttcgtttgtttagactgtcaattgacagtctatttttttgcattaaaataccccagcgccgtttttaggctgctggggtattttgagttgttcgactaatctgtactttgaatcaccgcgacaatcccggttttaaaattaaaacgaccggtcgcaccaataaattcattgctagcccatgaaattgggactttcgtgtcaaaatggtgcaacggatatttctcatcaattaaatttaaatcagttgtcggcgtcaacggaataaacgctaaatactttttatcgacctctttggcaatttgatagtcgcccggcaaataaaaacgaatcgtattttggctatcccgcatctctaagcgatttaagaacggtttaaagcgttcttccaacggcatgaatagattcgctaggaagtggtctaaacggccaccagtcgcaccgtaaatcacgacttgatcagcagcaagctcttcaagcgcaattgataacgccagttgggtatccgtttcatctttttcggcttgaaccgcccgaatgtccccgacttgttcctgaacctgttgccgttcagctggtgttaatgaatcaaaatcacccacggcaactgtcggcacaatccccttttgtaatagacgccaagtcccccgatcagcagtcacccactgaccggtaatttgagttggtttttgtaactctggtgcccattgttcgattggcccgcccgctaataaattaacgcgcttcattggctgccttctttaaaagcgcaatccgttccgttaaatcacccgcaaatgtgtatgaaccagcgacaaaaatatcagcccccgcttgcgcgcaagcgacgattgtttggtcgttgaccccgccgtcgacttcgatttgataagtcgcatcagcatgctgatcacgataagcagcgagttcactcactttggtcaacatcgctggaatgaatttttgacccccaaagccaggattaaccgtcatcactaaaacttgatcgactaacggtaagaccgcttcgatataactaaccggtgtcccgggattgatgaccacgccggctttaaccccagcatctttaatcatttgtaaaccacggtataggtgctttgtggcttccgcatgaatcataatcaaatccgaacccgcttgcgcgaattgttcgatgtagcgttctggttgttcaaccatcaaatggacatctaagaccagcttcgtcagtggccggatgccagaaacaacttgcgcgccaaatgacatattcgggacaaacatgccatccataatatcgacgtgcaataaatctgcgccagccgcttccaaattttgaacatctcgttgtaaattcataaaatctgcgcttaaaattgacggtgcgatttgtgtcatctgtctaacttccattcttttatgattttgattttttataaacggggcgtaaatcctttaattcagctctaaattgtaaataattatcgtaacgactccgcaaaatttgacccgcttccagggcttctttaacggcacatttcggttccatcacgtgttgacaggttctaaacttacacccttgaccgatttcacggaattccggaaaacgatcaaccaaggtctcacttgtgacgtctaacaaccctaacgatgaaaatccgggtgtatcaccgactaatccgccattaattggaatcaattcaatatgccgcgtcgtatgtttcccacgattcagacttttggaaatttcagccgtggccaaatttaatttaggttcaatatggtttaacaaggttgatttacccgcaccggtttgaccggtaaagaccgtcgtttgattcgcgaaggtcgcttcgattgcggcaatcgtttcagctgtaaaagcggtccgcggtgcaaatatccggtaaccaattgacgcgtaataatccaacgatactttaatttgggcgtacaattcatccgaaattaaatcagttttggttaaataaacggtcccttgaacgtttaaactttccaaataaattagaaaacgatccaaaagatttaatgaaaaagccggttcaaccgctgacataatcaccactacttgattaatattcgcaatcggtggtcgaatcatttcattttggcgttctaaaatttcaagaatgtagccttcactttgttctttactttcgaattcaacgaaatccccgactagcggtgtgattttacgcttccgaaaattaccgcgcgcccgcgtacgatagatctgttgaccactttgtacctcgtaaaacccactgagggctttaataatctgtccggtctgcaataggccacctccgaatattaatcgctatttattttctgacagttgcttgactcgctgaactcgattcagtcccgctaggctggctactcgtttcgctcggttctgattcgctactactcgattcactactactttctgattcactactgctgctcgaagatgtttcactcacagattctgaaggttgcacgactggtgctcgcggtcctttggataacacaacattgagacggtcgcccgcttggaccatcgtcccgctagcaggcgattggcgaatcactaaaccggtttgaatgctcgtcgaatattcctccgagaaagtcaccattaaaccggcttcggctgcataatcttgaaccgcttgttgcgtgtaatcacttaaatcacggacggcaaaggttggtttcccactgctgacggttaacgtaatcgtcgttttgctagggacaacgtttttaccggcatcaatactttgattcataatagtccccgcatcaaccgtcgtcgaactttgatacttgcgtttaacggttaagcctttttgtcgtaattgccgactcacatcgctataaacttgatctgtgtaatccttaattcgatattttttctgacctgtgctgacggttaaatcaacggtactacctgctttaacccgtaagcctttgaccggtgtggatcgaatcacgtggccactatcatattgattactagccgttttttgaatcgtaccgacctttaaatttttatcggtcaacacatcttcagcgttttgttgcgtcatatcagtcaaatcgggcacgctgacctcgctaccttggattgcgtaagcaccaaccgttcccagtagcaccaatagggcaacgccgatgccaatcaaccaccattttttcttcttgctcatcttagacttcttagcttttttggcgtttgattcagccggcttagccgctgtcgcttcagtcacctgttccgcttgatccgtctgagtaagcccttctggatcgagcgccggaatcaccttggtttctcccaaatcgctagccttattcggcacaaatttcggttcgtgtgcgcgactagccgacaaggatgtcgctaaatccgccgccataatcttgacgccgctataccgttcatcaggatccttagcggtcgcttttaagaccacgttttccaatgcttgcgggattcgcggatcataattgcgaaccggtgggacttcattttgaaaatgtttaatcgcaatcgaaaccgccgattcgccttcaaacggcaccataccggtcaataattcgtatagaataatccccaacgaataaatatcggaacgtttggtcgccattgaaccacgcgcttgttctggtgataaataatgaacagaacccaacaacgtgttggtctgagtcatcgcggtttcgcttaacgcaatcgcaatcccaaaatcgctaattttcacgttgcccgcttcatcgaccaaaatattttggggttttaaatcacgatgaataatattgtgatcgtgggcgttttgaacggcggataaaatctgcgccataatatcgatcacccgttggtacggaatcggaaaatgttcaacgatgtatttcttcaaatccgccccttgaacgtattccatgacgatgtattgcatactattttcttcgcccacatcataaatactaacgatgttgggatgattcaattcggtagtcgatagtgcttcgcgtttaaaacggcgcaccgtattaggatcgttgcgtaaatctaaacgcaagactttaaccgcgacttggcggtctaaaatcaaatcttgggctaaataaacgttcgccatcccaccttcaccgattggtcgaataatttgatagcgaccgctcaccgcataacctggttccatcatatcggttgcacctcgcgatcacggtgtaaaatcagcgcagtgatattatctaaaccaccagcttgattcgcttgttcaatcaatgattgacacttttcgtccaacgtcgtgtcggctaataaagtcgttttaagttgttgatcatcgaccatgttggttaaaccgtcggtacaaagcaataaataatcatctggttcaaattcataaatcgtcacatcggcatcgacatcttgtgaaacgcctaatgtgcgcgtaataatatttttttgtggatgatgccgcgccgcttcttcggttaattcaccttgtttgactaattcgttgaccaatgaatgatcttccgtcaactgttgcaactgctggtgacgcaaccggtagacccggctatcaccaatattggccactagataattccgccccgaaattaggaccgccactaaggtcgtgcccatcccggttaggtcatcatattgattcgccttggttaaaatatgttggttttctttttgaagttcaaaaatcaaccatttaaccatcgcttcgatatcggtatcattcgtccgttcaaattcgtaaccaatgtgcgagactgccatttcagaagccacatcgccacctagatgaccgcccatcccgtcggcgacaatcgcaaactgagcgccttttttattcgtataaaatccgacataatcttgattgttttgacgttgttgaccaacatccgttcgatacgctacttccatagaaatcacctcaattaaaatttaagctttccgttgcaaacaagcaataaaaaagccgtctgtttgataatcatctggataaatctggacaaatggcgttgcttgattttgcgttaatggtaattcgagtggcacggggacgaccgtgaattctggatgttgcgccagaaaggccgttattacctgttggttttcttcaggaacgattgtacaggtactatacgttaattgcccaccgacttttaaagttggtgctaccgcgtttaaaagcgcaatttgaatcttttgtagattgatcaaatccgccggttgccgactatatttaatttcgggtttccgtcgcattaatccaagcccggaacaaggggcatccactagaattttatcaaacgtctccgcggcaaatttcgtgctaattttgcgagcatctaacgcttgggcttcaatcacatcttcgacatgtaaccgtttggcattttgttcgatcaaacggactttatggtcatggatgtccaaagcgactaaacgaccgccttgttgcgcatctaaatatgtcgcaatgtgcgttgacttaccaccaggcgctgcacacgcgtctaagacttgatccgtcggttgaatttggagactcggtgcgaccaacattgaactttcatcttgaatcgtataggaaccggcttcaaaggccggcccactcgctagatggccgccttgagcgactaaaccgaccgatgcaatctgactaggcaccagattttcaaactgttcttgtaattgcggcaataagtccgccaccgaatttaaacgggtattgacccgaatcgaagcattggccggttgattaatcgtcgtcaataattgcgttaacttctcgatgcccaaatcagcttgtagtttttcaactagccattcgggcacactgtaagtgatactcaagcgttctaatgacgattcgatttggtttaaatcggctaaaccagtccgttgcaaattccgtagaatcgccgtcactaatttagcggtaccgacatggcccatttgtttggcaatttcggtcgcttcataaaaaatggcatgttcaggtacccgatccaaataaaccagttggtaaacagccgtccgtaaaacctgacgaacccaaacagccattttagttggcttttgaatgaacggttttaaatagtaatccaaggtgtattcatgttgaatgacaccgtagactaattgcgttaagaagcccgcatcttggggatttaaatgttcttttttgatgacctggtctaacgccaagtttgaataacttttttgtttggtaatcgtcgttaaaatttcaacggctaaataacgcggggtctttttaggcatcttgcaccaccacttgttgaccggctgctaattgtttgccgacaccgttaagatatgattgcactggcatcttagccttaccagcgggttgaatttcagtgattttgagcacggtctggttgccggccgcgatttcaaaatcttttttatgaatggcgacaatcgtgccgggtgcaacgtcggtcgtcgtttccgccaccgtggcctgccaaactttcgtccgttgaccgttgattggtaaccaagcccctggttgtggccgtaaagcccgaatctgattgactaacgcttgcgcgggtttagtaatgtcgagtgcttcttcttctttagtaatgttatacgcaaacgtcacttgactctcatcttgcacggtccgtggtgctgtttgatcaataatcgcggggagcgtttttaacaataaatcgcgcccgacgaaactgagcttatcaaataacgaccctgtatcgtccgtagcttcgattggaatactagcttgttcaatcatgtcaccggcgtccattttcttagccatgtgcataatcgtaatcccgatttcagaatcaccattcaatacagcgtactgaataggggccccaccccggtatttaggcaataatgatccatgaacattaatggcggcaatttgcgcagccgctaataatttactgggtaaaaattggccgtaagcggcggtcacgattaaatcgggttgtaagtcaatgatcgttgcaagttccggactaccacttaatttttcgggttgatagaccggcaagttcaagcgaaccgcggcttctttaacgggtgtttgttgcaatacttgtttacgaccgaccttacgatctggttgggtcacgactgctaagacctcgtaatctgcttgatccactaaggcttctaaaattggtactgaaaattggggggttcccataaaaacgatggctgtcatttaaaatcactctcacttctaagtaaattgtaatggttcgttgtctaacccgattttaaagccgttgcgggtgtcaacttgggttgtttctaaaatttcggctaatttagccgctaattggggttcttgtttatatttaatcacaatttggtaaaaataacgattattaatccgcgcgattgatttcggcgtcgggcctaacacaatggcttgctcggataaaatcggccgtaattgtttcgcaatttggaaactcttcttagcggcttgaacttcttccggatgactaaccgtcaactggaccgtaaaataatacggcggataattgccacgatggcgcaccgccatttcatagcggaaaaagccttcataatcgtgcttttgcgcaaattgaatcgcataattctccggattaaacgtctgaactaagacctgaccgggtttgtccgcccgaccagctcggccactaacttgcgttaatagttgaaaagttcgttcgctcgcccgaaaatcgggtaagccgagtgcggtatcggcgttgatcacgccgactaacgtcacatcgggaaaatctaatcctttggcaatcatctgcgtcccgagtaagatatccgcttggtggtcaccgaactgttttaataatttagcgtgcgccccttttttacgggtcgtatcgacatccattcggataattcgcgcgtctggcatcaaggtttgtaattcagtttctaccttttgcgtcccagtcccgaaataacgaatttgatggctttgacagttgggacaaatctttggaatcgcttcttcatgaccacaataatggcacttcatcgaatgcgaatccatgtgtaacgtcaacgaaatatcacagttgggacattgtaagacaaagccacaatcccgacacatcacaaacgatgaaaacccccgacggtttaacaataaaacactttgttcacccttggctatacgcgccttaagagccgtcaataacggcgccgaaaaattagtcgtttgttgttgcttgagcgcttcacgcatatcaatcaattcaactttgggcatcggttgttgattaatccgttgcgttaactgaattaactgataaacgtgtttctgcgcccgtgcccgtgattctagtgaaggcgttgcactgcctagaatcaccggacaatgatgatgacgactccgccacaaagcgacttcgcgcgcatggtaacggggactttcatcttgtttataactagcttcgtgttcttcatccataatgatgacaccaatatcggataaaggcgcgaaaacggctgagcgtgcgcccacgacgactttagcttcttgacgttcaattcgacgccattcatcatacttctcgccttctgaaaggccactgtgtaaaaccgccaccaattcgccaaaccgtcctttgacccgttgcaccatctgcggggtcaacgcgatttcggggactaacattagggccgtcttggcttgttttaaaacggcttcaatcgtttgcaaataaacttccgtcttaccactaccggtgaccccttcaagtaagaacacttgatccgaatcagcggtcgcggcttgcgtaacttgtttaaccgcggtggcttgttgcgccgttaacgccattttctgcgtcgccgcaacggcttgttggtacggatttcgataagtttcgaccttaatttggtgcaaccaacctttttgatgacccactcgaatattttcccgagtaaaagtcgtttgctttaggacatcctttaataacggtggtctttggccgattaaactttgcacatagctaatcaactgttgttgtttcttcgctgattggcgcaatccggtccgcgcttcttccaactgctcaaacgttaaggccggttcgatagccgttaattctttgacttgggcgcgattaccaacgtggtaagtcacgctgactttgtcttggcgttgtaacgtcattaattgtttcattttatctggatcgagattttgatcaaaggtcaattcatcgttatcgttaaataaactcgctttgagggccggctcaatctcatcaattagggtgacggttttcgtgtatttagcgcgcatcacactcggtaacatcgtttgcaaacaggtaattaaaaaggcgtacgtattggtcgccatccaacccgctaattgcaataactccggattgacgactggttgtaaatcaactagtgcctctaaagttttaagttgtcccgtaaactcgggctgatcaacgatggtcacgacaaagccctgaattttacgatcacctttgccaaaaggcacgaccacgcgcatccccggtttaatcgtatcaactaattgatctggcacttgataatcatacgggcgattggtttgtagtgttggcacatcaacaatcaccttagcaatttgtggcatatcaccactcctttatttttgaacttgtgcgatccgggttaaaatctgggtcgcaatcgtcactttcgtggttaatggcaacttttcagttgtcccatccgcccacagtaaggtaacttcattatcgtcggcattaaacccacgatcagtttgactgacgtcattagcgacaagtaaatcaacttgtttagccgctaatttaacttgcgcgttgctgagtaagtcattggtctcggctgcaaaaccgactaagaattgggtcgtcttttgttggccgagtgctgctagtatatccggatttttagtcagatttaattgaaaatcagtttgattgacctgttttttaatcttttgtggcgcatattgaacgggtttaaagtcggcaacggccgccgccatcaccacgatgttcgcttggtcgtaaaccgcttgaactgcaccttggagttcagccgccgtttgcacgtaaatcacccgttccaattgcgctggcacggctaattcagggcgcgtgctaattaaaatcactttggcccctaacattgcggccacttgcgcgactgcataccccattttaccagaagaacggttcccaataaaacgaactgggtctaacggttcagtcgtgccgccagcggtgacaaccaccacttggtctttcaacagttgtggtgttagcaaacgcgttgcttgcgccacaatctgcgcttcttctggaaagcgaccttgaccattgtagccttccgctaaaaaaccagtcgccggttgcatcacggttaacccatcggtgactaactgttgcacattacgttgagtcgctggattcagccacatatgttcattcatcgctggcacgattaatttaggggcggtcgtcgctagtaacgcggtcgtcacaaaatcatcggcaagtccgttggccagcttggccagcacattggccgtcgcgggtgccacgatggccagatctgaccaatcggctaaatgaatatgggcgacttgatcgggttggtcaacggcaaataaatccgttaataccggtcgtttggtgagcgtcgcaaacgttaatggtgtcacaaactctgtggctgattgggtcatcgccacttggaccgttgcgcccgctttaatcagttgacgaactaaaccggccactttatagaccgcaatcccaccggtcacatagacggcaatcttttgattagctaacgacattctaaaaccccctaaaattaaaaaaaccgcatttcaagttcaacatccatcgatgaataaactaaaaatgcaggttttctctaattattcttattcgccatctttttgagcgagcttatccattttttcagcatctttttcaagcatcaatgaatcaggatcgataatgacatttccagcagcaatttcttccattgccatcccaaccgattttggtgattggtattcagataacatcttcatgtcacctgcttcgatttcgtgagctcgtttgctagctaaaaccgctaatgaataacgtgagttaacattttctaataatttatcaattgaaggatatacaatcatgttttagtcccctatcatttttttatataaatcgatgacccgtggcacacgtagatgttcgccttcgataatcttttcaatccgtttaaccgcattgggaatttcgtcgttcacaactgcgtagtcgtagttttccatcatcttgatttcatcagcagctttgtgcatccgcttatcaatcgttgcttgatcgtcagtgccgcgtttttgaatccgattgcggagttccaacaaatcaggcggtgttaagaaaataaaaacgccatccggacatttgtctcgaacttgcatggccccttggacttcaatctctaataaaacgtcccgaccagcgtccaacgtttggttgacgtacttcatcggtgtaccgtaataattatcgacatattgcgcatactctagcataccatcatttgcaatttcttgctcgaattcttctttactgacaaaataataatcaacaccatcttgttcgcctggtcttggtttccgagtcgtcattgaaactgaataatgaaagtcacgaaattcatcttctagcatcgcttgacgaacggtccctttacctacacctgatggacccgataaaacgatcaacattcctcgattggacatctgcgcaattccctcttcttcataaaatagttatattctattttgcactattttccgcttaatatcaagttttgactcaacatcgtctattaaaatatctactctactttttaaattagctttcgttacattttctaatcatatccaccataatttcaatagactttttcaattgtttcaaactataagtattatttttattttcaggatgatgaataatatttcttacaaacattggtaaagtttttaattgatcgcatgttgatccatcattttgaagtctgatatatttaatatcagactctattccactttctttgagataatcattaaacgcattttcattagttaattttattagtttttttcgcaactgattatcaggagtatcattctctaataatgtatctagttggtctttattaaatctatcttgtaaataaccaaataactcattatgaaattctacacttgaaagtccaaaggcaaaataattaatttccccccacgtaggactaaaaggaaataaatccatcttttcccctgataatattctatttttatcacgtgaaaaaatttttatactctgcccatccccatttggattaaaccgttttaataaatacggggaatgtgtagtaatgaaaacctgagaactatttgaaatattttcaaacgaattaattaatttatcttgggcagcaggatgtaaaaaggtttcaggctcatcaacaaagaagaacaattgtttggagttttcactatttattgattctgaataaatttgtattaagctcattgctaatgctctttgcattcccgtacccttttgactaatatctgttgttataccattttctgttagattaatacttccatttttaaaaaaattttccatttctggtaatccaaaattaaaatcaacttttgtttccccgtattgttctgccattataccttgaattttatttgatgttccttccaaaacatctataagttctccacctcttccaaatgctgttttatgagccttacaaagattctgatacgattccgactcttggaaatcatttgtaattgcatttattaatttaccaactatcttagtttttccaaaatcttgataatcctcattcttcaaatctgaataaacaaactgtgcttcgaataatgctgttatagtattgcttacgcctgttgggttctcaaattcattaattttatcattccaagttagaacttttttaatatcatcagatgatctcaaaagttttaaattatatgtatcattctccttaaaaataaaattctgatatttttttattgaatcattagtcacaatatcaggaatatcctttccagaaaatgtaacttctactgaacattcttgatcctcttttcctttagtaacccaatctaacttatttctcccattttgaagaaattctattgctctaaatactgttgttttaccgctattattatttccgaccaaaaaattcattcttgaactaaatagaatttcatgaattccatcaaaacttctaaaattttttaattttaattttgaaatatacatatcatttaacctcatctttttgtaatcgttaacaaaattatatgcttttttactcaataaaaatacccttatcgattattcgataagggttacctttaagattattcccactctaccgttgcaggtggcttgctcgtaatgtcgtacacgatgcgattgacgtgatcgacttcgttgacgatacggactgagactttttgtaagacgtcccaaggtaatcttgagaagtccgcggtcatgccgtcaattgagttgacggcgcgaatgccgacggtgtaatcgtaagtgcgaccatcacccatgacaccgacactgcggatgccaggtaagacggtgaaatattgccaaacttctttatcgaggcccgctaaagcgaattcttcacgaagaattaaatcactatcacgaacgatttgtaatttatcttcagtgacttcgccaagcacccgaatcccaaggccagggcctgggaatggttggcgccaaacaagtggatgtggcatgcctaatttttcgcctaattcacgaacttcatctttaaataaggtctttaaaggttcgattaagctaaattgcatgtcgtctggtaaaccaccgacgttatgatgtgatttaatcgttgtggctgtgctcgttccactttcgatgatatcagtgtacaaagtgccttgggctaagaaatcaatcccgtttaacttcgtcgcttcttcatcgaaaacttcgataaattcgttaccgataatcttccgtttcttttcaggatcagaaacaccggctaatttgttcatgaagcgttcacgcgcatcaacttgaatgatattcaaaccgaatttgccgcctaaactagtcatgacgtcttcaacttcgcctttacggagtaaaccatgatcaacgaagatgctgactaattgatcgccaatcgcgcggtgtaacaagacacccacgactgatgaatcaacgccgcctgataaaccaagcaagacttttttgtcaccgacggtttcgcgaatctgagcgatttgcatgtcgatgaaatcttccattgtccagttattttcagcaccacaaacgttgaaggcaaaattcttaagaatttcgttcccaaattgcgtgttttgaacttcagtatggaattgaatgccgtaaatatgtttgtcgcggttttcaatggctgtaaatggcgtgttatcactttcagcaacggtgacgaaaccggctggaattgacgttactttatcgccatgactcatccaaacagtttgtttttcaggaagacccttgaacaaatcgctgtctttgtcagtcacggtgatttcagctttaccgtattcacgttcagttgacgcttcaacgctgccgccatttttataactgatcaattgcatcccgtaacaaattccgagaattggaatccctaattcaaaaatttcaggatccactgaaaaagcaccatcatcatagacgctcattgggccgcctgagaaaacaatccctttaggggcgatcttcttgatttctgctgcggttgtcgtattaggcatcaattctgagaagataccaaattcacgaatccgacgggtaatcagttgattatactgactaccgtaatccaagacgataattttatcaaaatcttgcatgtctgtttgggccaaaccactcactccttttttataaaagctgcatactactaacgctaattaattatttatattgtatttattttactgatagtttatgaaaacgtcaatggattgacagcattactttgaaaaatctcattctaagatcaatatttccgtagaaataccttgtcaatcacgtgatgtttcgttttatgcaaaataacatcggcccgattgcgggtcggtaaaatataatcgttcagattacgcaggttaatatcgcgccaaacccgtcgcgccattttaaaggcgctggcccggtcactaatcgcgtacggataataataattggtcggatcatccttggccaaatcgagtaacagatcaaagcgttccaaaaaccacttctcaatcaacgtcggttgcgcatcgacgtagaccgagaaatcgaagaaatcactgatgtaaatttgttccgtcgacggtagctgtaagacgttgatgccttcgacaatcaggatatccggatcatcaatcacgtcgaattcatcgggcacgatatcgtaaatctggtgtgaatactggggtgctttgactggcccgatattatttttgacttcattcatgaaattaatcaacttcggcatatcataactttcggggaagccttttttatccagaatccccttttgtttgagaacggtggttgggtacaagaagccatcggtcgtaatcatctggacctttttatccggatagacccggctcaatagtaattgtagtaaacgggccgtcgtactcttgccgacagcgacactgccggcaatcccgatgacaaagggtgtcttgtgtgattgaatattcagaaatgttgatttctgggtttgttgttgttggaattgatcaaaattaatttgtaataaatgacggagtggaatgtagatatcgctgacatcggccagtgagatccgatcgttcaaaccactgatctgttgcaattcggcagcggtcacgtcggtaaattcttggccgtgaccatgaaacgtctgccattcatcccgcgagatttcgtaataattcatctcgtttttcatgctggttatcctcctggaaattaactaggtgctaaacgttttcattctaccatagttcggccaaaatcaacgcgaaaatcccgaaaaaacaacgatttgtcacttttatctgtaaaaagacaagcgcgggcacgcgttcaataaaaacggcccgcatctccaatcggatttgcgggccgttcgtttagctgcgagtcactgtgtataaatcagcactaaccgttcccaacaatggtgataattcatcagttgcgagcaacgttaagcggtgcatcgcacgtgaacaaatcgtatacagcaattgacgttgatcttcgtggttataattagcggcactaatttgccaaccaataatcgcatcgaattccaagcctttcgctaagaagctagggacaaccaaggtgcccgccgctaagcgttgattttcggaacgaatcaacgtgactggcatgccggccgccttgagttgttcagtcaacgcttgggcttgttccaaggtcttggcgataattgccgtcgtcaactgttcagccgtgttggccgctacttggtgttgcacgtccgccactaaatcagcttcttgttgacgcacaattaagtttggtttgtcgccaacccggttgaaggcttcgattttttggccaccttttaggaggcccttggtaaagtcggtgacttgttgcgtcgaacggtatgaacgggtcaattgaacgactttcgtattttgcgcgtcgaataattgttggacctgttgtaagagattcgaactattgcctttggtgaaaatggcttggtttaaatcccctaataaagtgaatcgcgccttaggaaagtggagttttaagaacgccaattcgtacggcgtataatcttgaatttcatcgataaagacgaaacgcatgtcgcgttcgccgtgtttaccggtcattaaatcgtagagatggagataaggcgtgacgtcagccaaggtgatctttttggcctttaattgggccacaaagttggtgacgtgagcttgccaatcggcttcagttaaaccgaaatcagctaacttaactaattggggcacgacccgcataaattggacgtattgggcttgaatactcaagaaacggttgcgttgaattgatttttgtaacggtttaaaggcctttaaaacgatttgcttggcgatgtattgattctcatccccaccggttttaaagtctttgccagccatcaattcgcgtaattcttcatcgctgagattttcagcccgttcagccacccattcagccttggtttcatgactcatcttgtggctcaaactccgcaatagtttttctttggtgccgtctaagcgattgccgagatggtaattctcgttgaagctatagtaaacttcggcaattttttctttcgtaatgattggccgatcgccaactttcaaatcccggaaacgcatgccttcggtttccaaaaaacgcgcgtatttcttaacggctttgtagaagactaagctttctttcaaacggctaatccgaccgtccgtttctgaaatcggtgtttcgaattgatcaaataaactttgtacgtcgagattcggtaaacgtcgtgcgacgtattggaaataggtcatctgaatcatattttgttcgcctaattctggtaaaacatcggcgatataatcgttaaataattggttcggtgaaaacatgatgacttggcttgaatccaagttaccgcgataccggtataacaagaaggcaattcgttggagaatcgcagacgttttcccggaaccagcggcgccttgaacaaataagaggtcggcatcggtattacggataatctgattttgttcgcgttgaatcgtggtcacaatcgtcttcatctgcgtatccgacttttcgcccaagacttcaagcaacatttgatcgccaatcgtttcttgcgtatcaaataacgccttaatctgaccgtcttcgattaagaattggcgtttcaacgaaatattaacgtcttgcggaccgtctggtgtttggtaagtgacatcgcccgtccgaccttcgtaataaatcgatgaaatcggtgcccgccaatcgtagattaagaaatgatcgtcgctatccgtaaatgaacccaaaccgatgtagattgattccgattttggttcacctttttctttaaaatcaatccgcgcgaaataaggcgtcttttccattttttgtaaagtcgctaattggcgggaagattgttgccaagaatgattccgttcttgtagcatttgccgttgttgttcaattgagacggcggtttcggtcatcgctgaatcgttattaaaattaaggcgaacatcattaaagaagttttcgttaatttcttgttcttccgatttagcgcgtttaaccgcaccctcaaaatgcttttcagccgttttgaccagggccacaatttcgtttaaacggctttgttctaatgatttttgtacgtcagtcaaagcaaatgcctccaaatttctaaataaacagtttaaatagtttaacacttatttcacaagagtgcgagtaaaatcgctcgtttatggttggccgattaaatagcctgccgcggcgaccaaaatccctagaccgtaagttaatcctaaatagccaaagaaaatatgatatcgctggcggaaccacaattgactcaactcgctattgaacgtggaaaacgtcgtatagccgccgagcatgccggccccgaaaaaggtcgttaatggtgaaccgagttgggccgcggtcaaccaaccgagtgcaaagctcccggttaagttaatcaaaaacgtaattaatggaaattcgctagcaatctgagtgccgactctagttaattgatagcgtagaatcgccccaattgccgcaccacagccgactagtagaatcgttatcatttgaccacctgcacttcgccgtgcttagaaagtagcttaacggcccaataatcggccaataaactgcaggcgaccccaccaatcagactaatgccgagataccaaccaaaagcagccagttgatggctctgtaataaccgcaacgcatcgacgctaaacgatgaaaaagtcgtaaaggcgccgaaaaagccggtgccgatggctaacgctaattggtcgttcaaatgataatggccgatgatgtagcgcattaaaaacggtagacaaaacgccccgattaaattgaccgctaacgtcccgtacggaaaaccaccgctggaattgaagcccaagccgattaaatagcggctaatgccacccaaaaaagcaaataacccaacggcacaactttctttaattttcatctgaccgaccccgttttccaaaatatcgtaccttccattttagcatgttaattccatttgtaaattgacccaaaggacgacctttaatttctcaactaactagtatatgccttcaaacaacttattaggtgtcgaaaggcttttgaacatggcaaaccgcgcatgagtcatcgtcttaatcacaccacgtgggacacccaaattcagctcaacgatcatttaattttgacgggtaataaccaagcgattccgaccgttcgtcaataacttgaaaaacagaattaaatgcttgtgatactttgcgcttttggcctagcacatcactcataataggtttataatagaaccatcatgattaaaggatggtgcagatatgaaacaaggaacaacaatcctcacattggataacggttatcatttatggactaatacccaaggaactggcgacattcacttattatgcctacacggcggccctggtggcaatcacgaatactgggaaaactttggtgaagaattagctgaccttggcgtgcaagttcatatgtatgatcaacttggttcgttttattctgatcaacctgattattcaaaaccaggcaatgaccagttattaacttatgattatttcttagatgaaattgaagaagtccgtcaaaaactcggtatcgacaatttctatttaatcggccaatcatggggtggcgctttagttcaaatgtatgctgctaaatacggccaacatttaaagggtgcgatcatctcaagtatggttgatgaaatcgacgaatacgtgacaaacatcaacaagattcgtgaaaacatcatgacccctgaacaattaaaattcatgcaagactgtgaagctaaaaatgattacgacaacgaccaataccaagcattagttgataaattaaacgctggctacgtcgatcgtaaacaacctttagccatttcacatttaatctcaacgatggccacagacgtttacggcgtcttccaaggcgacaacgaattcgttgtgactggtaaattgaaggattggcatttccgtgaccaactccacaagattaccgttccaacgttaatcacatttggcgaacacgaaacaatgccaattgcgactgctaaaatcatggctgaaaagattccacactcacgtttggtcacaacaccaaacggtggccatcatcatatgatcgacaacgcaccagtctacttcgatcacttgaagaccttcatcaaggatgttgaaggtaataatttcaaagattaagagtgctgactcagccgtttagcttctgagtatagcctaaaatggcgaattatgacgattttagtcatgattcgccatttgtagctagccggaagaagctggctgggaagcacgtctagagtgctgactcgagttgctcaggctttgaggattaacctaaaaacaggcattatgggagcgttcttaacccataatgcctgttttgtagttaaccggaaaagactactcgagaagcacgttttaattaagagtgcttttcgttgcgggtagcaactgagcattaataaaaatagcgtattatgacgattttcagtcataatacgctattttagattaagcggaagttattccaacaaaaaaaccacttcacccgccggaactagccggttgttgaagtggttttttagtatacaattgttgatcagaacgacctgacctagtccatcttttggatttcttttgccaaaaagctttctaattgcttcgtttcatcgaataattggcctaaatccgtgtgatgttgctgttggtaagcccgcaacagctcgtctaattgtgcggttaattgctgggtgacctgctgaccggtttcactcaacgcaataaaaactttccgttgatcggactcgtctttgcgttccttagtaatcagtttcttgccatataaaacgttcaccttgcgtgaaatagccggattactgaccgccaaaatctgcgctaacttcatcacttcaattgcgctatcctgggagactttcttcaaaattaaatactgttcgtaattcaatccatagctttccgttaattgattaattgcatggtaaattcggatcacttgaatgtaccattcttcaaatgattgctgttcattttcaacttgtatcatcttctctaatccctcatctatatcaaatatttaataatcgaatattattgatttaattaataaagtagcatattttcagttaaattaaaaggatgattaaccaccttctatatcaaattatggaaatatttttctacgatattgcttattagctataccaattaccccacatcccttcaattctcttaatttccgctaatattaaagcgctatctatgctaaaatagggttaataactaatttagttggaggtcgttatatgaaacgtattactgtttatttagtccgtcatggccaaactttttttaaccggtataaccggatgcaaggttggtcggatagtccattaacgcctaaaggcattgccgatgctgaattagccggtaaagaactgtctaaaatcaattttgcccaagcttactcaagcgatcgtagtcgggcgatggatacggcccgcattatcctaggcaaaagcttctatttagataccccctacacgattaccccccatttccgtgaagaattttacggttattttgaaggtgaagattcccataaggcttggtacatgactggtgctagtcacgatgcccaaacttttaaagaaattattaccaaatactcgctcgatgcttctaaagactttatgaaggctgctgatccgtttcacgatgctgaaaacgccgttgaatattgggcgcggcttggtaaaggctttaaacaactccgagctgaatgtaccgatggcgacaaagttctgatggtcagtcatggcacgaccattcgcagcatcgtcggtaaatttggtcaaggccaattcgatgtcagcgttagcccgatgaatgggagcatcaccaaaatcgtcttgaccgatgaaggcgttgatgttctgacttacaacgaaacaaccctctaaagtccaaaaagctcagcaaattgcccaatcgcggcgtttgctgagcttttttatatagatttaatcttgcttcttcaaaacaatcccttggtacaaccaagtggttaatacgtaatacaaaccgtataacacaatgaaaatcccaaacggtaaccatagattatggtatggatcgagcatgatggtcttaaagagttgtaatccaaataacacgtgaatcacaccgacaattcctggtaaaaggaataaaaccccaatttctttggcaattgattggcgcaataatccttggcgcgtcccaattttatccaacatggtataccgtttaacatcgctagcagcaccggaaagaattttgaacattaagcaactcgctaacatcgctaagaaggcgattccgaggaagaagcccatgaattcaaagccgctgaagagcccgttgagcatcgtataacccgcatatttaccactgtttaattctggatttttttgcaaactaggattagccgcaatttgtaatcgatctaactgcttaatcaatggtaagttcgcggcaaaatcagccactcggtagacttgaaccgttttagtcgttccttgtaattggtcgaaggtcgtttctgaaaccaatttcgcttgtttcgcgaattgatccggtacttgtacactccgaaccgtataaccgtcgccaatttgttttgttaattcagcgatactcatctcttcagtcttaggtaacttcatcgataagccaccgttcgatttagagtagacctgtttcaacaagggttcttcaacaaattcagcttgttgataataaatcgtttgaccaatttctttggtgtgataagtcgcttgaacttcaatccccgtcaactgagccgctttcttttgcgcagccttggtgggttgattcaaaacgacgtcgtaggcgctggtggccgaagccatctttggaatctcactttgatagccaatcccaacggtaatcgcgcctaatgctaaggcgaataacatcgccactaacgctaatattctggtataatctttaatccgaaaaccgagttgggctaatgtaaaattgttcaacccgcgattggttaaccagctactcttcttcaacattttgattaaccaaccaaagaaggcgttaaagagcatgtaggtcccagaggtaatcgtgaataacgccacaactaatcccggcaataagaagctggcaaatttaatcatcattaaatagccaatcgcaataaaactgaggcctaaaatgatttgaatcgctgtccaccacggattattgcgcactcgattaggttgttgatcatcatgtaataaccgcaaaactggcgtcttcaatagttggaattgattgacgaccgcagcgataataaataagacaatgaagaaaacgagtgtcactaagacggctggccaataaagtggtgagaaatgggtcaccacagcatctaaccgtttaattaaaaattgactgacaacttgggttaaaccaaccccaagcaccgttccaacaagggttgccaatgtgccaatcacaatcgtttcggtcgcaatcaattgcgcaatcttacggcccttagccccgagcatcataaacatcccgtaatcacgccgacgcatagtcatcaagaaactattcgcgtacatcacgtacactaaggcaatcatccctagcaagactgaaccgatttgaaaaataatcgccgccataccaacgggtgaatttccggacacaaagtccttattcatcgccatcgcttcaaacatgtaaaaaatagcgctggccataatcagcccagagaatagaacgaaataatctttaaagcgtcctttgattccagttaatgataatttccataacatcgcaagtcgcccccttattgattaaatgtccctaagacacctagaatttcttgataaaaggcttcgcgactcttatcaccatgcactaattcttgaccgatttgaccatctttaatgaacaagatgcgttgacaataactggctgacaaaggatcatgcgtcaccaagagaattgatacgcgttgttcttcattgagttcggccatggtatccaataattctttggcactcgttgaatcgagcgcgccagtcggttcatcgccgaatagaatcgctggattatgaacaagcgcccgggcagcggcgacccgttgcttttggccaccggataattctgtcggatagtgatctaagatatggtcgattgacagtgtttgtgcgattttagtcacggccactttaatctttttgctgctgacattttggagcgttaatggtaaggccatgttttcgtaagccgttaagttttcaagtaagttgaaatcttggaacataaagccaatttctttagcccggaaatcagctaaagcgttgccttttaaatgatcgatggcttggccgttgattgcgacttgaccggttgttggtcgatcaagcgttgatagaatgtttaatagggtcgttttacccgaacctgaagcgcccatgatgccgacaaattcgccgcgttgaacttcgaacgaaatattttttaatgcggtatactgtttttcattcggtttaccgtacgttttttgaacatctttgacactgactacgattggtgtttccatcacaaatgcctccaaatttaatttataacctaattgtactgaaaaacaaacgcaagcgcccgctatttaaatgacagtttatgagattcaaatgacaagtttgtaagttccgtctggcgacttttaaaatttcatgtgaaacattcgaaatgttttgtcatctctagtcgctttgattataattaaaaactgttaagttttcagaaaaaaggagtctttctatcatggatgaaattgaacccaaaaagaaatacattacgtggcaagtcttagctctaatggattttgtcaccgtaattggttttgacgatattatttataatttccaaaatcaaggcatggccgtcgtattctcttggatcgtgctattattcgcctatgtcctaccctacgaattgatggtcggtcatctcggttcggctttcagcgaagatggtggcgggctttcctcttggatgcgccataccagtggcgacgtttggggttacctgaccgcttggtgttactgggtcgccagtctcccttacttagtggatgtcgctaattcaatggtcgtttcgtttttctggatcattaccggtaacgggaatcttgaagatcatttatcgcgggcgagttttgcgttactaaccgctgcgattacgatcctattcatcttttttcaacataaattcaccgcatcgctccaagtcctcagcattgtcgggggtggtgcgatgttcatcatgacgatgctatttgtcatcatgacctttgccggtttgttcaacggcgcgcacatcgcgacacaaccgatgaacttgcacacctttattccgaagtttgatttacactatttctcaaccatcgggttattaattttcgcgatgaacggcgccgaattagtcgcaccgtacgtcggtgaaatgaaggatggtaaaaaggacttcccaaaagccatgatggccttagcgttaatgaccgcctttctaacgattttcggctcctttgcgattggcgtcttcttcgatgccaaccatttacccaacgatttgaaaatgaatggttcctattacgccttcctagcgttgggcaaacaattccacatgggcaaaatcctgctctacacgtttgccgtcacccaagcgatttacatgggtgcccaactcgccatgttattagacggtggtacccggattttcttatccgatactgcgaagaagtttttaccgaaagctttaacgaaaactaacaaacaaggcctgccaatcaacggctactggctgacgaccgggatttgtaccttcgtcctcgcctcaagcgccttcttacccggcatcaacgatattttcaattggttgttgaatatcaacgggattgtctcaccgtttgtcacctgtttcatcttcgtcgctttcttacgggtccgcttcaatcccgagaagttcccgtctgaatacacctatatcaaaaataaaccgtgggcgattatcgtcggtttctggtgtctgttaattaccgctttggggaccatcttcagtatcttcccccaagacgcgacaccggggacgtctaaatacacgcacgaattaatcttaaacgtggtcgtctcagccgccttaatgggcttaggcgtcatcttacccttaatcgcaaaatatcaacgcaaacgcgtcgcctaaatcaaaaaggattcgacttattttagtcgaatcctttttttactttaattgttgtcgaatatttgccaacgttaattcagctgtcgtctcaaaacgaatttgcgccgccgctaacacgtctttggccccaatcccaactgagactgcaccggacgcgttaatcgcttgaatccccgcttgagcgtcttcaatgccaaaacattcagcgggctgcaatcccaataattcagcacagcggctaaagatttcgggatctggtttacctttgtgcaacgtcgttggatcaacccgcgcttggaaatagtcgctgagacccaaccgttctaatacaaacggcgcatttttagacgctgaagctaagccaattcgatagccttgtgtctttaattcagttaagaacgccgtcattccgggggcgattgacgctggactcaactgttgcaacagtgccaaatagcggtcgtttttctcagtcgcaaattgggacttctgttcggcagaataggcatccggatgaccggttgcgttcaacagcacggctaatgacgcttcacgactaaccccttttaactgttccgcaaattgcggttgccagtcaatctgcaattgatccgctaatgcgtgccacgcttgttcgtgataaaccgacgtatcggtaatcacgccatctaaatcgaataaaacccctttaatcgtttcaaacttaggcatttttgcgcccctttctacttaattttctaataattgtgggcgcccgttgagttcaatcgtcaatggttggccttcaatcaatttaatttgcgtcccgttttgatcaacggtaatttcaataatccggccacggaaaacttggcggaacgaataacgttgccatttcttcggtaggaatggtttgtaactcaacgtgccatcgtcgtgaacccgcatgccggcaaaaccgtggacaatcgctaaccaaccaccagtcatcgccgtgatgtgcaagccatcttcggtatcattattgtagttatcgagatcgagacgcgccgtccgttcgtagagctcgacggctttatcttcatagttcaaatcagcggcaataatcgaataaaccgcaggtgataaacttgattcgtgaaccgttaacggttcgtagaaatcaaagttacgtttcttttcggcttctgaaaaatcatcgataaagttccaaataccttgaatcacgtcgccttgtttaatgtacggtgaccgtaaaattttatcccacgaccagttttgattaatcggccgttgatccgctggaatttcgctagccggcgttaaatccttgtccaagaaaccgtcgtgttgttcaaaaatccccagttcggtatcgtaaggcaaatacatttgatcgacaattgcttgccaatgcgcccgttctgcttccgaaatggccaatttggctgcttgttcgggggcgacttgcgccgtcatttccaacgtatattcaagtgtccaacgtgctaaataattggtgtaccaattattgtcgacattattttcatattcgtccggacccgtcaccccgtgaatcatgtattgacccttgcgttgactataatgaacgcggtcggcccagaaacgggcgatttcggttaagacttcgctaccttcatgcaacacgtaatcggtctcgccggtatagcgcgtgtaattataaatcgcaaaagcaacatcgctattacgatgaatttcttcaaacgtgatttcccattcgttgtggcattcaatcccgttaaacgtgaccattgggtacaacgcgcctttcgaaccttgttgcttggcattgacgaaggccccatctaattgtttgtagcggtacaataatagattcttcgtgatttccggtttcgtaataccaaggtaaaccggcacacagaatgcttcggtatcccaataagtcgcgccaccgtatttttcaccggtgaagcctttgggaccaaagtttaaccgggcatcatccccataataggtggtgaaaagcccgaataaattaaaccgcatcccttgttgcgccaacacatcgccgtcgatttgaacatccgattgtgcccaacgctccgcccagatggcttggtgggccgccaataaatctgcgtacgattgtggcgcgactttagccatcaattgggtcatcgccgtcgttaacgcggcttggtcggcataatcgcgtgatgtcacgaccaccacccgtttttcaatcgtggcttgcgcttgtggtttcaaatgcgccacgaaggtctgttgaatctcggtcgccgtagttgtttcagccacttgggctaacgtcgtcacgtgggcgacttgcattccagtcataaattgcggcgtgccaaattgattggccttagtttgcgcgattaaatggtccggcgtaatcgccaaaacttcccagaagtgttcatcgtaattcgcatcttcattttgaacgttactatcgaccgccgaaatcacggtcacgtcaacggtttgctgacccaaattctggaacgttactcgttgcaacgacaattctttttgtgcaacgcttaagaaccgctcgaacttgaattgtactttagcagcccctttagtcaccacgaatgaacgggttaaggtcgccgtctttaaatcgagattcaattcgaattggtcaaatcgatcagtggccaaatcgagtttttcaccgttaatgatgaaattcattttaataaaattaatcgcgttgatgactttcccgaaatattccggataaccattcttccaccaaccgacgcgcgtcttatcggggtaccaaacgccacccaaatagataccgggtaagctgtcgcccgagtaatcttcttcaaaaaagccacgcatccccatataaccgttgcccagactcgtcatcgattcctggaggcgtttatcagccggtttaaattcatgtgtcacaatctgccacggttgtgcttcaaatattctcttcatctaaaatacactccatttacataattgacttaaataattgtgatgccagtttcaacatcgaagtagtgtgctttggacatttcaaaagctaaatcaacttgactactatttaaaataattgctcttgatatcttttattattcgctatcgattccattttagcaatcgctttcatcttgttaccgataacagattataacgaaccgttaattaaaaacggggctgtgacagaactcatcaattgccgttcaaatcaaaaaatcgtctatcctcagttttctggataaacgacttttttaacttgataggcaattgataacgtgccaacagtcaccgcttggtcgttgtcacttttgttcaaatagataggcatcataagcggcgagtctaaagcgttgggtgattgtttgagaggtcgtattactcaagcgacattgccagtcctgttgccagacacggcggggtaacgtgatggttttagcttgtgaacttaaattaacaagcactaagcatgtttgttgctgtgcacggcggacatacgcaaagacggtcgggtcatttttcaacaatagttcaaaatcaccgtcgatcaaagcgccttcttgatggcgaatggcaatcaattgctgatagaaatgccaaggcgattgcggattttgaacggccgccgtcgcattaatcgtttgtatgttctgattaaccactagccaaggttgcccggtagtaaagcccccattagccgctgcagtccactgcataggtgttcgcgaatgatcgcgactccaacgcgtcagttgtgcaagcgccacactgggcgctacctgttggctgactagcgctgtatattgccgccgtagttcttcagcatcgacttgttcaatactggtaaacgggaaattggtcatgcctaattcctgaccttgataaataaacggcgtccctttcaacccgagatacatcaaagcaatcgctttggctgatttagccgtttcgtcgcccagtatgctgttaattcgtggattatcatgattctcgacatacagcgcattccaaccatgctggcctaaatcagtctgccaccgggccaagacctttttaaggcctaatacatctaagcgcggttggcccgtatcggcttgccggacattgtgttcaagctcaaaaatcatattcagatagccggcctgcgccggatccgtccaactgaccgcctttttactcgtgaccccactggcttcaccaacggtcataatctgatattcattaaacaaatcccgtaattcggccatataaacttcgatgccggccacgttcataaacggcgcccacggattatcgcgaatcttgaaatcccacggcgccttttgaatgtgactgatggcgtctaaccggaaaccatcaatcccaaggtctaaccaccaccgaatcatctggtaaatcgcttggcggactgcgggatttcgccaatttaaatcgggttgttctttggcgaaaacgtggaaataagcctgtttggtttgcgcatcgtaagtccaggttgatcccccaaagaaactttgccaattattcggcattttctccggggtcgcgtcggcccataaataatagtcgcgatacggattatccttggatttttgactttcgataaaccacgggtgctggtcactggtgtgattaacgactaaatctagaatcactttgatcccaattgcgtgagccgcttgcaaaagcgttttgaaatccgccagcgtcccaaattcgggttgaatcgcttgataatctgaaatatcgtaaccattatcaacattcggcgattggtaaatcggattaatccagataaaatcgatgcccaatgatttaagatacggtaacttttcgataatcccagaaatatcaccaatcccatcgccgttagaatcgttgaaactccgcggataaatttgatacccgacagcattttgccaccatttagttgtcatctgattcagccacctttaccacgaaggattgccaaggcgtcaattgcaaattggccaacgaagtcagttcagtctcgtcattttgaataatcaccgtttcgactttttcggccggtaaatcaatctgttgcggttcgtttgaaaaattattgacgactaaccaggtttcattttgataacgacgtttgtacgcaaaaaccgactccgcggtcgctaataattcaaaactgccccacaccataattggattattttggcgtaaccgaattaatttttgataagtataaaagagtgaatcgggatccaccaaagcggccgccacgttgatcgtcgcataattaggattaaccgctaaccaaggttgaccggttgtaaaaccggcttgctcagtcgcatcccattgcatcggcgtccgcgcgttatcgcggcctttaacattaattgaatgcaaaatatcggccggcgaatagccgtttgctagacgttcagcatacatccgccgactttcgacatccgcaacttcactaatatcatgcaccacccgattcgtcatgccaatttcttcaccttgataaatatatggtgtccctttaagcatgtgtaatagaatcgcaagcatcttaccacttttaacacgatactgaccatcattaccccaacgcgaaataatgcgcggtaaatcgtggttattccaaaataacgaattccaaccttggtcgcctaattcagtttgccatttagcaaaaacccgtttcaactcactaatgcgtaacgcctgtaaatcccatttagatttgccaggttgttcgtctaagccaacgtgttcgaattgaaaaaccattgataattcgtgacgttccggcgccgaatacagttttgcaatggccggggtcgcgccccaagtctcgccaaccgtcaataagtcccgattaccaaaagtggcttgattcatctcttgcaaataatgatgtaattccggcccattaccggtaatgccttgtgctggttgtttgccgattaaatcaatcacgtctaagcgaaaaccaccgattcctttatcaatccagaaattcatcatgtcgtaaatcgcttggcgcatctgcggattctgccagtttaaatcgggttgtttctgactaaataagtgtaaataatattgttggctagtgtcgtcatattgccaggctgaaccagaaaaagtcgattgcaattgattcggcacaccgccatcggctgccggatccgcccacacataataatcccgatacggattagctttcgattgccgcgcttcgacaaaccaagcgtgttcatccgaggtatgattgaccactaaatccatgataatccggattccgcgctgcttagcttcagcaatcagccgttctaaatcagccatatcaccaaattcggccatgactgcttgataatctgaaatatcataaccgttatcttcattaggtgattgataaacgggcgataaccagattgcgccaatccccaattcctgtaaataatctaatttttcaataattcccggcaaatcaccaatcccatcccgattagtatcgttaaaactccgcggataaacttggtaaacgacggttgattgccaccaatattgttgcataatcaatctcctctttaatatagaataaagccgttcggtgccatttgaacttgttgctcttgaagcgttatctgctgacttaaaataacgggttgggtttgcgttaaactaaccgttgtttgtcccgtgttaaaaatcgccgtcaactttttgttacctaaaattctcgtcatttttagcacatctggtgcgctctctttaatcgaccatttcagttggccttccgataaaatcggttggtactgtttccgaacagcgatcaaagctttaacaaactgatagagttctaaatcttgttgatccgcatcccaaacgagacacttccggcaatccggatcattgcccccagtcatcccgtattcatcaccataatacaaacaaggcacacctggttggagatacgtgaaggccatgacttggcgcattaaatcgcgattaccttgcgctgcggtcaacagacgggccgtgtcatgcgaatctaaaacgttaaattgaacttgattggtttgatcccggtataacatcaattggttattgagttcagaaaccatcttattgagtgggatttcctttttaacgaaatagtctagaatcgcatccgtataggcatagttcattacggcgctaaattcatccccatttaaccagctttgagaagaatgccaaatttcgcctagaatgtaaaaatcaggcttcgcggcgtcgcagacttggcgaaattttttccagaaatgatgatcgacttcgttggcaacatctaaccgccacgcatcaatatcaaattcttcaatccagtaacgcgccacttttaagagataatcctgtacttcgggattggccgtatttaatttcggcatgtggggcgtcgttgcgaaaacttcgtaagtcaaatcagtcgcatcttcaaaattacgaccggcttggtagctcactggaaattcatgaatgtggaaccaatccgcgtattgtgaagcggcccctttttgcaacacgtcttgccattgtggtgattgatcacccaaatgattgaacaccgcatccaacataaccttaatcccgcgttgatgacattcagcgactaacttacggaataacgctttgtcgccaaaactaggatcaatttctaaataatcaattgtgtcgtatttatggtttgaatgggccttaaaaatcgggcagaaatacaagccattgatgcctaaatccactaaatcgtctagatggtccagcaccccttgtaagtcgccaccatagaaatcttgggccttaggtgattgggctgaccagggtaaactgccttccggatcgttgctgggatccccattggcaaatcgttctgggaatatttgataccaaaccgtttgcttaacccattctggcgccttaaagcgatcgatttcgtgtagataaggcattttaaaataacttttcttagcttgtgctactggataacaaccttggtcgccgtagaagatctgggtgccatcgacgccggtaatttggaaaccatacgccaaccgattatgggtggtggtgacttccgccgtccaaaaatcatataaatccgttgataagccccggtgcatcgccaccggtttttggtcccatttttcactgtccattaaatagggatcaccggccaataagctgactttggcaatatccgcatgggctgttcgtaaccgtagatgcatgacaccggcctgatagagataagcaaattcactatccgggcgatgataaattgctgctgtattcattaaaataaccatccttgttttaaatttttcaattaaaaaagctgtacagcaaaccaattcaagttttaccgagttgattgtttgtacagcctttctatttagattactgttctgactatttaaccgaacccgatgtaatcccttctacataatatttctgcatgtagataaataataacgtaattggaatcgcaatcaggacacaccccgctgtaaatgacatgaacaaggagttcgcggtggttttattcatcatcgaatatagtccgatggccaccgtatagttcttgacgtcatcgcccatgatgaccttggcaaaaatgaaatccatccaaggccccataaaggccatcaaagcggtataaacaatgattggttttgataagggaatcgtaatcttcgtaaagatttcccacttattggccccatcaatcatcgctgattcatctaacgccattggaatcgtatcgaagaaccccttagcgacgtaaaagcctaacgctgcacctgctgagtagattagaattaaagcaaatagactttgcgttaaatcgagtgccttcaaaatataataaacggcaatcatactcatgaaaccggggaacatattcaatactaatgcaacttttaaaaagggtcttctgagtttaaaccgtagtcgcgataatgaatacgccattgcaatcgtgatgaatgttgataagatacaactacaaattgcgacaaacaacgtatttaagaaccagcggacaaacggataactccccgtcgcatcagcgattaattttgtataattcgacagcgtgaaacttttaggcatgatgtacggcacaaaagcgccgccttcttttctaaaactggttaaaacaatccagacaattgggaataaccaaatcacagccatgataattaggatggcgtaaatcaggtaacgcgtatttctctgttttgctcgataattttttgatttcatttgcgctgccattttttacgcctccttataagaattagtccgggtgtaagcccataaactaaagactgctgataagataaagatcaaaatcccgatgacggatgctaaattataatccatcgtattgaccgtcaaattatagagccaagtgaccaatagatcggttgaacccgcaccgtaataatttgaatttgatgggccaccacccgttaagaggtaaatgacgttgaagttattgatgttcccaataaattgttgaattaacgcgggcatcatcacaaatagaatttgcgggaacgtaatggctctaaaaatttggaatttattagccccatcgattctggctgcttcaatttgttcctgatcgagattttgaataatcccagttgaaatcaacatcgtcgtcggaatcccaatccacatattcaccatgataatcgatattttggctaaggtgggatcggttaaaaacggaatcgactgcgtaattaatcccatgttctttaaaatcgcattgattggacccgcatcgtttaataaattatgcatcgtcaacaatgacacaaactgtgggactgcgatcgtgaccacaaagatggtccgccacatcttcttaaaccgaatccctttagtattgattaataatgctaaaataatgccaaaaaagaaacaagtgattgtcgcaaatatcgcccagatcagcgtccagcttaagactggaaagaaggtcgaagccatatcacccgtaatcacattagaaaagttctttaacccgacccaagtgaataaattcttagggggtaaatgcgtgtgatcatagtttgtaaaggcaattgaaaccatatacagtaacggtaagattgtaaaaaacaatacccctaatagcggaatggtcatcaatgtcatgtggaatcgttcattgactagactatttaaatcctgttttaaagtcggtactggatccccagcttgctttaattcatagatatgccgtgcactttttaaattaataatgtataaaataatgatgacaatgcagaccaacaatgctgaaataccgaatagcaacaggagcattgaattatcacccttttgtaacacgtcaattcctaaatcagcgctgtacaccaagccttgtttcttagtgcctaatgtttgtaacattgctaatgcgtggattccatttcccacaaaccaagcaagaaagccaacttcggccgctaaaaatagcaacccttttacaaattggcgattggctaaattggcagcacccatgacgacaaacgctaatttagtggcaaaatcaccgtctttaaatagtgttctaaatggtatatgttgttccttgtatgcctttttaaacatatcatcgcaccttttctttcatttcaagcaaaaattacttggtcttcttagcgttatctgttacaaatttgtctagtttttcttgatattgtgttgatttgattttacctttataaacatcgttaattaatgaatccattggtggccagaaagttgtcatttcaggtaatttaggcataacaactgaatgtttcgtatctgacatttccatgactgatttagcaaccacgtccgttttaaccttagtggtttgttgtgcttgtttattagatgggacaaccccgtttttattaaattcaacttcttgcgttttttcattgctgaggtaatctgccaaagccattgcagctaatggtgacttcgtttgttggttaacgccgtagaccttaacgcctaagaaagtcttcatttgtttgtcgccactaccgaaattgaccgttgggtaagcagccacacccatcttatcgcctaaagcctttttaacatcgtttttagaccaaggacctgataagaaggcatcaattttgcctgattgaaggtttgctaaagccgctgcgttggtttgaacgacgcctggatttgatttttgtttagcaatccaagaaaggacttcgacccctttttggttattgaaattagtgccatccagattttcaccgttttgaccgtataagacatcaccattactcataaacaatggtgcaaaaatgtaattagtcccattttcagcaaaattggttcctaacttgccggctttcgttaagccgtcccaagttttaacatcatttgcagataacttactcttattatagtaaaggacttgtgattcaatcccgtatggatagccgtaaactttattcttccaagtgaccccttgaactgcagaatcaacattgttcttcttaatcgttgtaacttgtttcttaccaattggatagagtagacccgcttcagccatttggccaatttgatcatgcggcatcataaagacatccgctgctttgtcgggatctttagaaacatctttcaaagcatccgcagaagaacccgctttaactttgacattcacatcagggttcgctttttcgaatttggccacttgccctttaatcgccgcaatatggtcagtatcaacccataacttaacgtcgcccttcactttcgagctacttgcttccgaactagtcgattgatcactactcttattaccacaccctgctaaagtaacagccgatattcctaacacgagaccgccgagccaaactcgtttccaactattcttcatcttgaactcctcctagaactttaatcgttttgttttctagtacagtttcagtattaaacatttatcggctcgttgcaatcgttttcaatttgttaccgataacagctttttacgctgtctactcgttaaattagtatcgccgtttaactaatcgccattcttttaaacgcgcaatgtcccaccaatttcaatctgcggttcaaaaattaacgacccttggctgtccttttggctaattttatccaagactttctcgccacaagcactgcccatttcaatcacggcctgtttaatcgtggtgattttaggggaggcgacttgattcaaaaagacgccgtcaaaaccggtaatgccatactcttgcggaatattgccgccccgtttagcaatcgcccgttcaacgccaatcgctaaacgatctgtcgcgcacacaaaaacggtattccgattgaattgggcccaatgttcgtccacgaaatcttcggttaggcgactatggtttttaaaacgatacatttccggaattaacttactgtcttgcatctgctgcaaataacccgcttctcgcgacttctcaaacgattcttgtgtatccatcccaagatacacgaggtgttgatacccttttgctaacgccaattgggcgatcaactggatgccctttttattattggtatcgacataatcaaaaccgtaacggttctcaccaaagaccacgcacggtttggtcaacttctggatccattcgacatcgggttggcgcaaaccggtgatgatgtagccgtcacaattcccgatatcaatgttgcgccgcgtcacaagttgtaaggaatattggtgggcatccaacgctttggcaatcccgaccattaaattcatatagtagggttccaccacgtcgatatcttctaaaatacataacttaataattcgggtactattgctgacgagtgccttagcaataatattcggccgataatcgagttcgttcatcgcttgatacacgagctgcttgagttcatccgtcacttgttcaggatgattaatcactcgtgaaacggtcattttcgaaacattcgctagtttagcgacatccattaaggttgccatctgtttaacccctctacccattattaaaacttaatgacaattatagcatttataccaatcgagattcattaatagccttttttatgcaaatcacgatttaagttgacaaccccagtcaccttcaattttaaataaacaaaaacagtcatacaccaatttttaaattgatgtatgactgctcactattgctcattttcacactaatggtattttcgctctaaataatagtaaatcggcaagcccgccaacgtgattcctaagccaatcaacgctaacaccgtttgggtcatcaacgtgttgatcacaatgtagataccgcccaaaatggcaatcaacggcacaatcgggtacaaaatcgtccgatagggccgcggcatcgtcggttcgcgatggcgtaaaataatgaccgccacaaaggttaatacgtaaaaaatccaaatcacaaaaattaacatgtcggtcaaggtgttaaagcccccgacgaaaatcatcccaatcgcaatcactaattgaatcaggccacagataaaggggaccccggtccgcgatagttttttgagttggcgactgaacggtaagcgttggtcgagcgccattgcgtacggaattcgcataccggtcatcgtgtaaccgttaatcgcaccgtaaaccgagacgagaatcccgaccgtgacaattttgccaccaaacgggccaaacaagacttgggcgacgtcagcggctgcgttaccattgccggcaatctgccccagtggtaagactaataagaaaaccgcgttaatcaataaataaacaaccatcgtgcccgataatccgagtagaatcgctttcggtaaatcacgttccggctggcgcaattcaccggcaatattgccgacatgaatccaaccatcgtacgcaaataacgtggcgagtaccccgttgccgagtgcggctaaaacgttgtttgactgaccgtgtggtgtcacgctaaataacgagacttgaggtgcgccagcctgagtgtgtaaaagtccccagatgataatcacggctaatggaatcaatttaaaaaccatcgtgaacgcttgaaaagcgccgccgacacgaccacccaagaaattcaagagcgttaaactggtggcaacgataatcgcaattggaatctgccattgtgctgaccacccaaataaattcaaacattgcgttgcaaaaataatcgccagcgccgcgatgctcgctgggaaataaacaaccgtttcggcccaacctagtaagaaggccgcgacactgccataggcccgttcaatgtagcgcatcatcccaccggtttccggaatcgccgccgctaattcagcaacggttaaaccggcacaaatggtaattaaacccccgattaaccaggctaaaaggcttaaaccggtggcaccagtcacttcagcgaccggcgctgctttgaagaagacccccgcgccaatcacggtgcccatcacagtggataaggcggcggtgaaaccaatcgatcgatttaatgtcggttgctttttaatcacaatcactactttctatccaaaataaaaaaacacttgtcctagtattttaaactaaaacaagtgtcggataaagttttttatttaaattaagtctggataggtttgtttgaaatcaaccatcgccccaattaaattagcatcgttatggtactgacacgtcactaacttcggcgtcaccgctgcaatttcaacctgattgagaattttttggattgctttttctaaggcgggaattaagaagtcagcctgcgacaccccaccaccgataataatcgcttcgggatcaaaactgtattgtaaattatagatggcttgcgccaaactatcatacatgacttgggcttctttttgcgctaaagcatccccttgttgggccaacgcaaacacttcttgtccagtataatccgtctgagcttgttgattataccgttccgccattcggactgcagtcccgacgttactcaaaattgacccatcagccgttaacatatacccaaactcgccaccgagtagatgtgcgccgtgttggacttggccattttggacgaccgccccaccaacgccggtgcctaacacgagtaataaaacgttggccaagccttgcgcagcgccgttgccgatttcggctaatgcggcacaattcgcatcgttttccatcaccactggtaagccaaaacgcgtttcaaactcactttgaatatcaaaataatgaatgtaaggtaacgcgctcgaaccttcaatcatcccagtggccttattgaccgcgccgggcgtactcatcgcaacgccgaccacttgatcactggttttaaaagccgtgacaatctcagtcaacgcggtatagtaggcgtttaacgatttaggcgtcggtatttgaccctttttggtcaattcttggttggcgccatcccataaaccgtacttaatggtcgtgccaccgacatcaattaatgctaaatttttcatgtgctataatccccacttattttcaaacttatgcctttttatgtaacgctttcattttagcacaatcgcgataacttacctaattgggtttcagcggacagttaattttaattgtccgctgatttttagacctgtaagcgttatgatacagttgtataataattcatatagaaaaggaagttgtgcttatcatgaaaactaattttgactttttaatgcctagcgttaacttttttggccccggagtcatcgaaaaaatcggtgatcggactaaaatgctcactattaagaaaccgttggtggtcacggatactttcttggaatccgttccaaacggccctgttgcgcaaaccttagcttcattagaccaagctgggattgattacgcgatttttaacggcgtggaacccaatccgaaagtgcgcaacatcaaagctggtaaagccgcttatctagccgctaactgtgacgggattatcactgtcggcggtggttcagcccatgattgtggtaaagggatcgggattttattaaccaacggtgatgacatcacccaattggccggcattgaaaccctcgaaaacgccttgccaccattgttagccgttaacaccacagctggtacgggttctgaattaacccgccactgtgtgattactaacgaagaaactcatttgaaattcgtcgttgtttcatggcgcaatatcccgctcgtgtcattcaatgatccgatgttgatgttagacgttcccgctaaattaacggccgctactgggatggatgcattcgttcaagctatcgaaccttacgtctcaactaaccgcaatgcgattacggatggtcaatgtttacaagcaattaagctgattgaaacgagcttgcgcgaagccgtcgccaacggtcacaacatcgatgctcggactaagatgtgtgaagccgagatgttagccggaatggcctttaataacgccgacctcggttacgtccacgcgatggcccatcaactcggtggccaatacgacgcgccgcacggtgtctgctgtgcccttctcttaccaatcgtcgaagaattcaacatcgttgcatgtcctgatcggtttgccgaattggctgaagcgatgggtgaaaatatttcaggcctatcaacccgcgatgccgctgaactctcgattaaagcgatgcgtcaaatggcgactgatgttggtattccaaccagcattaaagccatcggtgctaaacctgaagacttcgaattgatggctgaaaacgccttgaaagacggcaacgccttctccaatccacgcaaagcgactaaagaacaaatcgtcgcactcttccaaaaagcgtacgacgcagaataaactgtgacagaacttggttatcaattgagtaccaagttgaaaaaacgattatccgtactaaggatagtcgtttttttgatttgaacggaaattgatcagttttgtcacgcgtcaacgaaacctatttgtttaatatcagaatactgagccttctaatactgctttttctatctcgttttcggcacctaattagtcttttaaaccgtttcatggtacacttaatggataaatggctgaccattcgccaattaacaaaggagcgtcaacgacatgtcaattcaactacgtttaacactgacaactaaataaacgtttgacccactcgtggtcgcttctgttgacatccgctttttaaattcgattatcaatcgtaagaagctgcccaaacagcttcttttttaatacctttatttatcaatcagcacggatttgcagtcgtggcccattcggtcaagtcaaccttaaaggagttatatatgaaagacacaacaccacaacctaaaagagtattagtgaccggcgttagtaaacgccaagacaatttcgattacaccatgattgaacttggtgaattagcgaaagccaacaacctgaacgtcgttggtgaagttcgccaaaacgtcgatcaagccaaccatgccacttattttggcaagggtaaggttcaagaaattaaagaacaagccatcgcggatgatgtcgatattattctcatcaacgacgaactctccccttcccaaattcggaacctcgaaaaagaactcggcatcagcatcctcgatcgcacgcaactgattctagaaatcttcgccaaccgtgcgcaaaccaaagaagcccaattgcaagtcgcgattgctgaggcaaaatatcaattacctcgtttgcacccttctgacaacaaactcgatcaacaaaatggtggcggcggtggcactaaccgtgggaccggcgaaacccaacttgaattggaccgtcgtttaatcgacaaacggattaccaagctcaaaggtgaactcgccaaaattgaccaacaacaagcgacacaacgccaacaacgtgataaaaatcccgtcccagttgtagccctcgttggttatacgaatgccggtaaatcaacaacgatgaaccggattttacaacgtctaagccccgatacacctgaaaaacaagtctttgaaaaaaatatgttatttgcgaccctcgatacaagtgtccgcgaaatcaccttacctaaccaacaaaagtttctgttgagtgataccgttggtttcgtcagcaaattaccgcatcatttagtccaagccttcaaagctaccttagcggaagcagctggggccgacttattaatccacgtggttgattattctgatccaaattacttgaacatgatgcaaacgacacaagaaacgttggaatcattagggattaaggacattccaatgattgaagcttacaataaagcagatttaaaaccagatacacgttatccggaaatcgacggcacgcaattggtgttctcggcccgtgatgaagtctctattgatgctttgattgacttaatcgataaacaactatttggtcaatacccgatcatcgattttctgattccgtatacagaaggccaagcagtgacttatttaagcgatcacgtcaacattcttgaacaaagttatgaagaggacggcacccatattaaagcccaaatcaatcctgatttactgggacccgttcaaaaatatatgatgactactgactaaacaatcaaaaaacgacacaactttcaattgaaagttgtgtcgttttttattagctgtttattgatatttttggaatactttactagcagcagccatcatttcttcaacgtcagcaatattgaccttaggcactgagacaacgtcattgtcgtacgttgcagctatggcctgtaagccgttgattgttttgggcgtcaacataatgtaatccttagcgtgttctgtatcacgcatcccaatcaataatccggcttttttaaacgtcatgatttgttcaattgaataaccagctgcttcgacggtcgttaattcgacataccgaccagcggccatttctttaattcgttgtaagacaatcgcatcgtctaaactgaagtcgatttgatcacaaatggcatccattttttcaaaatattgtaaactagcaacacttgctcgtacactatcgacgatttcattgactgctggtttttttcgagataatagattgccattttgttagccccacttttagaattagttgtcgttcttgaataacctaattctataatattcaatggggcttaaaacgcgggcttttttaggtttgaataaaaagcgcgaaaaaattattttaaccggacgtcactatcggtaattctgaaaacgaccggcttttcaattaagccataaccttcaggtgccgtgacttccactaattgataaacggccggcgtcaaataactcatgattacttgtccccgactgtcactctttaaattcgtgattaatacgttgccgagtcgatcttgcaattcaaatttagcacccgctagtggttgattcgtattgccatccacttggttgacaatcactgaacccggccgttgctcgttagtcactgtgactttcgtcatttgattcgctgtgatttcaaacgtttgcgttggcgcaatttgataagccgtcgcggccgttgtttgaatcaaacgatactgaccagctactaacttaggcatcactgcctggccattttgatcaatcacgacttgttttttaaccgtttgaccggtcgccgtttcaattctaaaagtcgcgccaactaaggctgttttgagtttagcatcactattgctcaatactaaaataccggtttcggtcgtcgttgcttgtttctgatcgatgacgttcaatttggtcgttgtctggtctgttacggtgattttaaaagtcttcgcgttcaattgatagccgtctgccgcttgcgtttcttgaaccgtatacgttcctggcgttaattctgcgacctttaattgaccatccgcatccgttttgtaattcccaatgaactgacctaattgatctttaaggtcaaattgggcacccgttaagcggtcacccgcttgattcgtattggtcaccgtcaactgaccggcttcaggcgtatcttgaatgcgtaactgttgatccgtttcgccattaatcgtgatttgatggctagttgcatccaagcgataactcgttggggccaccacttcttgcacgcgatattggccggcagctaaattagcggcggttgcaatcccatgttgattcgtcgtcactttttgagtttggccagtctgcacagattcaaccataaacgttgcgcccgccaatcgttgttcttgcaaatcagttttcacaatccgcaagtcgtggggcacaatcgttgattcgtggctgattaacaattgattatagccataagtcgtcacatgcaaccggtagacggttgcgttcaattggtagcctttaggggctttaatttcggtaattcgatattgaccggtgaccgcgtttggtaggacaattaaaccattttgatcagccgttaatacccaagtatcttgaccttggtcatccgcttgattggtggtgactttaaaaacggctcccgccactgattgcccatcagtattggttgtctgaatcgtcaatggattcgtaggtgcaacggttgtccgttgatccgcgaaattcaccacatgattttgccgttgtcgtggatccaccgtcacggttttcgtctcagtcgctaattgatagccagccggcgctttggtttcttgaatctgatattgaccggcagctagtccggtaaagcggacttggcccgcttgtgttgtctggacttgcgttgtgccgtcggttaggttagtgagcttaaactgggcctgatcgaggctaaaaccttgcatatcggttttattgaccgtaatctggccggttgtcgttggttgtactgcttgattggtcaaaataaactgttgaccctcagttccgagcgtcgcgccatgaatctggctatccaccacgtaattttccgcggtcgtcacttgttgatacgtcaatttaccaacgggcacgcgattaacggtcactaaaccattactatcagtcttacctgacaagaacgtcgtctgaccattaccgctagcaactaccgttttaattttaacgcgcgcaccggctaacggatggcgcgttgtttgatcaaccactttaaacgtaatcggtccaacagcgcgtttcaagcgttgcgtaaattcgttgacactttgattatcgatcgtgaccgttcgcgccgttggggctacttggtacccctctggtgcggctacttgtgtaatccgatattgccccaccggtaagttcgctaaagttgcagcgccattcgcaccggtcgtcacatttttaacaactgattcaaccgaatcgattaactcaactttaaattgaacacctcttaacgcttttccttggtaatccgtcgcttgtaaaacgcatttgtggcgcgtatccgttttaacgactcggtgtttaaacgtgaccgtttgcgttgtctgatccgttaacgtcacatgctgcgtctgactagttaactggtaacccgccggcacactcttttcagtcacccgataacgcccaattcgaaggtcattgaccgttgcttgcccattggcatccgttttgacatcctgactcgtgctgccgtcagtcgcttcaatgcggtagtcaacattcggaataggttgcccgctcgctgaaatactcgataagtgcaagccactggtctgttcataagctagaaaaagattttcagtcgttttttgcgccgtcactgtcaccttttgactggccggaacggtcgctgaataacctgcgatttgacccgcgggctggatttggtactcgccaatcggcaagtttgaccaactaacttggccattttcgtctgtcgtccccgtaaccgtttgttggtcattttgcaatgcaattgcttcaaactgagcacctgcaattggtttttgagtgctctgatcttttaaggttgtttgaatagcccccacttgttgttcaaactgaatagcctgactaaccggtgtttcttcagtcacggccatggtttgcatcgtggttttcaattgatagccttgcgcagtattaacctgaatttgatattgtccaactggtaacgccatcgttgtttggccatcaacaccggtgaccggtaattgataacttttgttagttgtttgattagtggccgtcatcaaaatatccgccagcggttgcttagcctgatcggtcgccgttaaggttaacttgccggtcggattggtatcaacatacgtcacttgaccgctgttgagatcattttcggcaacctcaatgatttgcgcactaagttctaattggtaaccagtcggcgatgtgtcggcggttaattgataccgtcccgggttaatatgggttgccggttgtttagcagtcacatcatatgcggtcgtaaaatttccttgatcgtcagcggttaaattgtacttcactctttgaccggataatgcgacaatctgaaccgtcgcattcggcaccgattggcctttcttatcgaccgcttggtaatgcatattatcgataccactcgtcgctggtgtcgtgtccgttgcaaacgcagcgattggcacactaaaaacgttcaccaataaacccaatatggcaaacacgacgattaacttttgaaatagatgttgatttttaatcaaattggtagtcctcatttctagtccactgactaatcattccgaactgcaaataaactacggccagctaactccccaaaaataacgcccacatgtgtacttgcaccaccactcccgccaggcgctggtgaaccagaacccccttggaaagcgacaatgtctttttcgacttgcgcatgatgtttcttaaaatcacgacgttgtttcgttttagcagttgttgattcagacgttgcctgctgactgctcatcgttggtttttgttgtaactttgattttggcgccgcttgaccgttcgttgtgcccgccaaaatagccgccggttgggcggtttgtttcgattcttgattagtggctgaattaggcgccactggggctgccggttgaatcaccgttgttcgcttagtcgattcagtcgtcgtctgaccgaattgttgtccagcgggttcttgcgttgtcggactcgattgttccgattcgcttgaatcactcgattcatccggtgtcgtgggtttaatagtcgtagccttcggatagctcttgacggtaatgttgatttccccacccgtaatcggaactgattgaaccggctgaccaacagcgaccgttgccgccgttacctgttgcacttgttggcgtaaaaagccctgtgaaaaacgataaacccctaggcttaaaatagttaatgaaagtaaagtcgtcccctttttcataacttctccttcttaagcgccaccacaatatccccaaattgttgccaattatgcacggttggcggatttttccaaattaattgttcgcaagttaaggcactagaataaaaatccgatagatacaaatcagtttgttcattaatggtggtttgtagttcaatgtttaaattgttaaagtagttgaccatcttgcgcatatattgattatatagtttaccttgcgagaaatccacgcaaatataaacacgatccttcaaaattctcaacgggatatcttcaatacacgcaaacatgtagtcatagtacaagctagcctgttttcgccaagccaatgttttttgttgattcataaaatcttgaataatttgatggaaaagtggattggattcagcaaaataggccagttgattttcatcaataaacgtcgtgggttcaacgtaaaaagtcagcatccgcatatgaatttgatccaaatgacctttcaatcggtctaacgcttcgtcaaattctgccgattggattggtcgccgctctaatcccaaacgaacttggtttaaaaattgttcacttttttctaaaatttgagtttgtaagcccgcatccagataattagtcgttaacgttaaatagccttccgcaaataagaacgtcaacaaactttctgcttccgcttcaagtggcacgttcaatagttgataatgttcggttaaaatcgttagcatggtctgccaaacaaccggttgggtctctttaaaatcaaccgccaacagacgaccatctacacttgccttgccccgcattcgtaaatattgaacttttacgaagatttcgagtttggtatccgttgtgggtaacaattcaatttgatattgctgaccaatcgcggttacgatttgatcaacagtctcttggagcatttcaaatggtttttcaatcccgttaaaataactataataaacttcaaaaataaattgccgaatttgattttctggtccaacaatctgattcttactaaattcaagaccaaactggctcgtcacttcaaccatttctttacgcaattcgtaaaatttcgttttacctatgaataaggcatcacaaaaatcggccgtttccgtttgtttcggattcattaaactaaattccaataacttaaataaggtggaatccttcaaataagctaaccgaatcttacggacaaccgcttcattaatctgctggctctcaaacatcccgtccccattaattacgagatgactttcgggactaatcgtggcgagatccacgttgatattttcgacgtattgactaattttaaacttagacaaaccgagaatcttcattgctttggccgtcgtcaaatagtagtcgccattatcggccactaattctaataaataatattgattaatcagcccatagacggattgggttttgttgaaaccttagtataataagaactaatgagtacgtgtgaagggagctttttagatgccgatagtctggcgtattttcttaattatcgaagccattatttttggcacatttatttggcagattatttcgtatcccgccaatctctttttcatcatcttcgggattgtttgtctcatttgggcgaataaacgccgaggcaaccgtaaagtcggctttttaacgactttgttgacgatgattgggacgatttcaattttagtgacgctcttcattaatttttcattgtggttattattgattaacgcggtcgtttttttggcgctcaatcatcgacgggtgggtcaattcaataaccgtaatttaaatcaattgtttgataatgcgccttggcaccggaagaattttgtgccagtcaataccaaagaaccgaccgctaagtcggatcaggtcaagcgtcatcaatggtttggcaaccaaacgattggcaataatatttttgaatgggatgatattaattttgcggtcgttgctggggatacgattattgacttaggcagtacgattttaccgaaggcggataaccacattgtgattcgcaaagggtttggtaaaacgcggattttggtgccggtcgggactggggtttatttagaccattccgcgatgatggggagtgtcatcatcgaaaatcaacgttataacttgaaaaatgagtcgattcagttgtatagtaaaaactatgatgaagaaagtcgccatcttaaaatcattaccaacgtggtaatcggagatcttgaggtgattctcgtatgagtaaattagcccgtagttttatttttggtatgacggtcttattgacgctcctgttttcagtggcgttgttttttgcgtatttctatagtgttaaccagaaacagtggttattgaaattagtcacagtccgcttgttttacgtgccattgctagtgtacatcattgcggcggcggtggtcgttggattgggtgtcacttcggtcgtgtatttattgatgcgccaacaattatcgcataccgaaagtcagttacaatatttggcgtcggggcaatatgaatcgccaatttttgaaaataacatgacgaacacgacggattttgtccaaccgattgagcaaaccattgaacaattacgtcaaaaaatgatacgcttgcaacatgaaattcaaagttatagtgaacgaccaaccgtcttggtgggtgaaaccaaggaagaaattttggcacaagaacggcaccggttagcccgcgaattgcacgattcagtcagccagcagttatttgccgcgacgatgatgttgtcagcgctcagcgaaatagcccaaaaagcgacggatcaaccgcagcttttgcaatctttaaccacggtcgaacgggtgttaaacgatgcgcaatccgaaatgcgggcccttttattacatctgcggccggttaatctggcgggtaagagtttacgtgatgggattattcaattattgaacgaattaaagactaagattagcatcgaaattacttgggatattgataatgttcagttaccaagcgggattgaggataatctgtttagaattgtgcaagaattgttgtcgaatacgttacgacacgctaaggcccacgaaattgaagtttatctcaaaaaagttggccccagtgtcttgctgaaagtgattgacgatggtcagggatttgatcccgcggtcgcccaaaaggcaggtagttacgggttaaataacattaccgaacgcgcgcacagtatcggtgggacggctaaaattattagtttacccgatcaaggcacgagcattgaaattcgagtaccactattaaaggagactaacttaagtgattaatgtattgattgtcgatgaccatgaaatggtccgattagggattgcgacgtatttaggggtgcaatctgatataacggtggtggatcaagcggtcaatggccgtgaaggggtcgaaaaagcgttggctttgcgaccagatgcgattttaatggatttagtcatgcccgaaatggacgggattgaagcgactaagacgattttaaaaacatggccagccgctaaaattattattttgaccagttttattgatgatgagaaagtctatccagcgattgaagctggggcggccagttacatattaaagacctcaacggctgaagaaattgcgaatgcgattcgtaaaacggcgcaggggcaatcggttttagaaccagaagtgactaataagatgatgaatcgaatgtcacaccagtcagaagtccaattgtatgaggatttaaccaatcgggaacgcgaagtcttaggcttaattgcgaagggccgtagcaatcaggaaattgcggatgaactcttcattaccctaaagacggttaagacccacgtttcgaatatcttagcaaaattacaagttgaagatcgcacgcaagccgcgatttatgccattaagaaccatttagcctaggaggcgcaaccatgcaaatcacaattacaccggcagcgagtcattggtttcaatcagaactaggattaaagagcggcgattcggtccgctttttcgggaaagtgtatgggcaaactgcggtgcacgatggtttctcattaggcgtagaacgtgctgaagtgcaagcaccaattacaacggtgacggttgacgggattacctattttgttggtgaaaccgatgattggttttttgcgggttacgatttacacgtggcctacaatgagacgttagatgaaccggcctatcaatttgaagcacaaaaaagctgaccatttctggtcagcttttttgatgtcctgattaatattgaatgacggttctggatgttgtttgcggtgttgcctcattaaacaacgttgctagttggttaaaagccactgtttcagtcgttggccaattaactggtttgaaattagtggcgagtagttgccagatttctttacggtctttacggggataatagacggaatcaatcccataaagcgtgacgccacgtaagataaaggggaggacactcgtgttgagttgaataccagccgcgttgccacaagcggcaaccacgccatcttggtgcatcagtggtagtaagtgttctagaacgggcccgcctaaagtatcaatcaccccggtataggtttggtgtgctaataatttagttggttgtacggtcagttgatcagtcgctaacacgtgagcggcccctaattgggtgagataagcgctttgggttaaatcacgcgtggtcgccgtgatttgatcaaaaccaagtttggctagaaaactgagcgcgaaactaccgacaccaccagtcgcaccggtcactaataagggcgtatggtggtcgatggttgctggttggcggagtaacttagtcaccgcaatcgccgctgtaaaaccggccgtgccgtattgcatggcttcttgtaaactgagatctgccggcagttttaaaagccaatcactggggactttaacgtactgcgcataaccaccatcaatttgaatgcccgttccatagccggtgcataagacggcatcgccgggttcaaaaaagagattatcggaggtgacgacggtaccggcaaagtcgataccgggggttgctggatagtttctcaagacgccgcttttagcgttcatcgtcagtcggtctttgtagttgatgtcggaataggcgattttcactaagaccccggttttgggtaacgccggggttaatttcgtttcgtaagctgctgtgacgttagtttcggttgcagttagaactaaagcttgataggcgaccattgtaaaaccccttttctgatttcgttattactgtcattatacatcaaacgtcagtttaaattggcataagagttcggaaacggtataattaaagggatattgacaactgagttaattgaatgaattgttaaaggggccaagtaaaatggaacaatcaatggtggaatttaaaaatgtcattaaacaatatgatgatgcccaaattttaaaaggcatcgatatggctttggaaaaaggcaaattttatacgttgttagggccgtccggttgtgggaaaaccacgattttaagaattatcgctggctttacgaatgcaacctctggggatgttttgtttgaaggccaacggattaatgatttaccggctaatcggcggcaagttaataccgtttttcaagactacgctttatttccacatctcaatgtttttgacaacgttgcgtttgggttaaacttacgcaaagtcaaaaaagcggatgttcaaactaaagtcattgaagcgttgaaactagttcgtttagagggttatgatcaacgcgaaatcagtgagctatctgggggtcaacaacaacgggtggccattgcgcgcgcactagccaatgaaccgaaagttttgttgctagatgaaccgttatccgcacttgatatgaaattacgcaaagcgatgcaatatgaattacgcgatttacaacaacgtttagggattaccttcttatttgtcacacatgatcaagaagaggccttagcgatgagtgatgaaatttttgtcatgaatgaaggtcgggtcttgcaaagtggcacgccagtggatatttatgatgaaccaattaaccattttgtcgccgattttattggtgaaagtaatattttacccggtaagatggtcgcggattatcaagttgagatggtcaataaggtcttcgaatgtgccgacgccggcatgcggccccatgaagccgtcgaaatcgttttacgaccagaggatttagatattgtggcggttgatcaaggccaactagtggtgacggttgatacccaattatttagaggggattattacgaaatcaccgcgtacgatactgatcagaaccggtggttaattcattcgacgaaccccgctaaagacgggcaacaagtcgggttgttttttgaaccagaagatgtgcatattatgcgttttggggaatcggaagaagatttcgatgcgcgactcgatagttacgaagaggaggaataggttagcatgcggcgaaaacagtttatttattatattccgtacgcgctgtggttagtgctattcgtattggccccagtcgcgctgattctttatcaatccttcttcgatattaacggacaggcgacgttgcaaaattatgcaacctattttcaatcagggacttatttgaagatgacgttgaattcactatggtatgcctttttaatcaccttaatcacgttgttgatcagttatccaacggcttattggttgcatcaaaccaagcataaacaattgtggttactgttgattattttaccaacgtggattaacttattattaaaagcgtacgcctttattggtatttttagtcaaaacggcgccatcaaccatttcctaggttggtttggcattggcccacaacagattctgttcactaattttagtttcttagtggttgcgacgtacattgaaattccgtttatgattttaccgatttttaacagtttagaagaattaaatccgtcattggtcaatgcgagtcgcgatttaggggccagcaattggcaaaccttcaccaaagtgattgtgccgttgacgatgagtggcgttaaagctggcgttcaagcgatttttattccctcattatccctcttcatgttgacccgtttaatcgggggcaaccgggtgatcaccttagggaccgcgattgaggaacatttcttaaccacgatgaattgggggatgggttcaacaattggggtcgtcttaatcgttgcgatgggcttgattatggccctgactggtgaaaagaaaaccaagaagaaggtgacccttaaatgaaaaagcacgcgtttaaatggcaaaatttatatttaatcgtcatctttatcttgttatacgcaccgattttctatttaattttttattcgtttagtagtggcgacaacatgaatggctttaaatcgtttacttggcaaaactaccagacgttatttgccgatcaacggatgattgaaattgtgctagagaccttgttgattgcgattctatcatcgctatgtgccacgattattgggacgtttggggctttggggatttattccactaaacaacgccgcacacggaatattattttgtcattaaataatattttaatggtgtcacccgatgtgattattggggcgagcttcttgattttcttcacattcttaggacttgggctgggctttggatcggttctattaagtcatatcgctttttcaattccgattgtggtcttgatggtgttaccgaagttaaatgaaatgcggccagcattagttgatgccgcccgtgatttaggggcaagtgattggcaagtgttgagtcgcgtgattttaccctacattagttcggggattttcgccggtttctttatggcgtttacctattcactcgatgattttgcggtcactttctttgtgacgggcaacgggtttgaaaccttatccgttgaaatctattcgcgggcccgccaagggattagtttagaaatcaatgccttatccgcgttgatgtttgtcttctcactgattttagtgggtggctattacttcattaatcaacggaatcaggctcaaaaagctcggcaaaaacgaaagggggccacgcgaatcaaatgaataaattaagtcgaattgcagttgcaattttagtggcctgtttagccttgtggctgggcattgtccaattacaaaaatcacagggttttacgaaggataatacattaacgttatataattggggcgattacatcgatccagccttaattaaaaagtttgaaaccaaaactggctatcatgtgtcggtcgaaacctttgatagcaacgaagcgatgtacactaaaatcaaacagggcggaaccgcctatgatttagcggtgcctagtgattacatgattgaaaagatgcgcaaagctaagatgttaaaaccaattgatcattcaaaattgacggggtatcaaaatctcgggcaatcatttttaaatcaaccatttgatccggataatcgttattcgctaccctatttctgggggacgttggggattatctacaatgatcaattgacgagccaaccgattaccagttggtctgacctatggcaaccgcaatataaaggcgacatcatggttgtcgatagtgcgcgggatatgatggcggtcggattgattgaaaccggtcaatcggtcaacagcacgaatccggcagctttggaaaaggctaaacaacgcctcgatcagatggcaccaaacgtcaaagcggtggttgcggatgaaattaaaatgtatatggtccaaaatgaagcgagtgtcgcggtaacttggtcgggcgaagcggctgaaatgctggcgaacaattcgcatctacactatgtcgtgccgactgaaggcagcaatttgtggtttgataatttggtgattccgaagaccgctaagcatgaaaaggcggcgtatgccttcttgaacttcatgttagaacccaagaatgcggcgcaaaatgcggattatatcggctattcaacaccgaacacagcggctaaaaaattattgccagccgccacgcggaataaccccgccttttatcctagcaatcaactgattcaaaaattgcaagtttacagcgatttatcaccgacaacggtgggcttgtacaatgatttatttttggagtttaagatgcaacattaagccggaagtcggacttaaagggcagaatttatatggtataataaacacagcttttttaaagggaggtcgctatgtcaattgactggtcacaattactaacttggcgcatgctggccaatgtattagacattatcgttgtttggtattttgtctataaattaatgatgctcattcgtggcaccaaagcagttcaactctttaaaggaattctcgtcatcgcactgattaagattgtgagttggtatctaggtttaaggacggtttcgtatatcatggatcagtttatcaactggatcgtgattgcgttaatcgtgattttccaaccagaaatccgccggggcttggaacatatcggtcgcggttcactattgatgcggggcaacaatcctaaattagaaaaagaaaatcaactgattaaagcgttagataaagcgattcaatacatgtcaaaacgccgaattggtgcattgatcacgattcaaatgaagactggtttggaagattacattgaaaccgggattgatttggatgctgacgtgactggtgaattattgattaacatctttatccccaatacaccattgcatgatggtgcggtgattattcgtgagggtaaaattgcggtggcggccgcctatttaccactttccgaaagtaatttaattccgaaagaattggggacgcgacaccgagcagcagtcgggattagtgaagtcactgatgctttaacgattgttgtttccgaagaaaccggtggtgtcacgttaaccaagaataatgaattaatgcgcgatttgacgcgggatgattatatgaagtatttcaattcgcatttgattacgcaagaggaagacaagaatagccttttacaagaattcattgatggcttcaaaaaaggaggccgtaaatgatgaaaaaatgggttgaaggaccttggccttaccggatatttgcgttattcttagctatcctactgtttgggtacgtcaatattgataagatcaatacgacgcggcaaacggataataatacgactcaaatgttagcgacccgttctgaaacggttaaagtgccgttgcagattaacgccgatacggatcaatatttcattaccggttatccgcaaaaggtgaaagtgaaattatcgggtcccaacgcgttagtgacttccgccgttaatacgttgaatttcaggatcattggtgatttaactaaattatcgacagggacgcacacggttaagctgaagcaaactgggattaataaagaaatcagtgttaaaattgaaccagctacgattaaagtcaagattgaaaaaaaggtcacgaagaatttcccaattcaggtcaacgtcaacgaagagaatttagcgactgattacagcattggtaatcctaagttaagtcaagatgtcgttgaagtcagtggggctaagtccgctgttaatgcggttagtcaagtgattgcaacggttgatccggctaaagacaccaaaaaagacatcagcgaagaagtgttgttgcaagccgttgattctgcgggtaaggccttaaatgttttaatctcaccacaaacggtcaacgttaaaatcgccgttacgatgaataaaaaagcattacccgttagtttagaaaagactggcgctgtttctgggtatcaatacaccttaacgacggacactcaaaatgtgacggtttatgggaaacagcagacgttggctaagttatcatccttaccggtgacggttgatttaagtgatgtgaccagttcaacgactaagacggttaaaatcagtttaccagatggggtttacgacagttcgccaacttcgattaaagtcaaagtggctgtcacgagtgatgggaacgaagcgagcagtcaaagttcgaccgcaacaacgtctgccagtaccagtacggctagcagtcagtccgaatcaactagtagttcatcgactgatcaatcatcaagctcggcagattcgtcagcatcgacaagtcaaagtacaacaaccgaataaaaataatctggaatagtatagaggagtttttgaaatggcaaaatattttggtacagatggtgtccgtggtgtcgccaatcaagaattaagcccagaaatggcatttaaattaggccgtgccggtggttacgttttaacaaagcacgcagacaaaaaccaacggcctaaggtattggttgcgcgcgatacacggatttctggtcaaatgttggaacaatcattaatctctggtttgttatcagtcgggatcgaagtcttatcattaggcgtcatcacaacaccagctgtggcgtatttaatcaaggtacaagaagcgagtgccggtattatgatttcggcttcacataacccagcaatttataatgggattaaattctttggtgccgatggttataaattaccggatgaaaccgaagaagaaattgaagcgattattgatgcaccaacggatacgttacctcgtccagaaggcgaaggtttagggaccgttgaagaatatccagaaggcgctttgaagtacacacaattcctagaacatacaattccagatgatttagctggtttaaaggtcgcattggacggcgcgaacggttcaacgagtggcttaattagccgtgtttttgccgatttggaaactgatttcacgacaaccgcaactcatcctaatgggttaaacattaacgatggtgtcggttcaacccatccagaaaacttggttcgtaaagtgcttgaatccggtgcggatgtcggcgtcgcttttgatggtgatggggatcgttgtatcgcggttgatgaattggggaatatcatcgatggtgataagattatgttcatcttaggccattatttatcacaaaaaggccgtttaaaacaagatacgattgtcacgactgttatgagtaacatcggtttgtataaagcgattgaagctaacgggatgaagtccgcccaaaccgatgttggtgatcggcacgtcgttgaagaaatgcgtgcgtctggttataacttaggcggcgaacaatcaggtcacattatcatctttgattatcataatactggggatggcatgttaactgggattcaattgttgaatgtcatgaaacaaaccggtaagaaattatcagaattagccgcaccagtcaaaacttatcctcaaaaattaatcaatttaacggtgactgataaagatgcttgggaaactaacgctaaaattcaagccgcgattgataccgtcgaaaaagaaatgaacggcgacggtcgggttctagtgcgtcctagtgggacagaaccattactacgcgtcatgtgtgaagccgctacggaagaaaaggtcaatcaatacgcagaccaaatcgcagcagttgttaaggaagaaatcgggtagagcgcgactcaaacggttttagttttaaatattaattaaaaatcaccatttaacccgaactgaggttgaatggtgattttagattagacggaaattattgtcagaaaaagcgtgttttaaaatcctataaataacgtccgatagtcctatatttcagggattatccggcgttatttttgacgccaaaaagattgactagcaatcgacgttgaggactataccgattgtgcaaactagtctataccaataaaaattcttgacattaaaaagcctaatggtattatatttaagtgttataccaattatataattaaagcataccaaagatgagaagaggattttataatgtgtggaattgttggtgtcattgggaaatcaaatacaactgaaattttattaaatggattagaaaaattagcctaccggggttatgattcggctggcatttatgtcaatagtcaaacgggtcaagattatttagtcaaagaacccggtaaaattagtgtcttacaagcggcagttggtcccgaagtgcaagggaccattggcgttgggcatacgcgttgggcaacccatggtgtggctagccaagcgaatgctcatccccacgtttcagctgacggtcgtttctatttagtgcataacggcgttttaacgaactatgctgaattgcgtgcgacttacttagctgatgttcaatttgcgagtgaaaccgatacggaagtggcggttcagttgattgcgaaaattgcccacgatgatcagttatcagccaaagaagcgttccgtaaggccttaacgatgattgaagggtcatacgcctttgtcatggtcgaccgcgatgatccagagacgttatacgttgctaaaaataaatcaccattgttaatcggcgtgggtgacggttttaacgttgtctgctcagacgcgctagcaatgcttaacgaaaccaaagattttatcgaaattcatgaccgtgaaatggtcactttaaaaaagaattcattacaaattgaggatttagacggcacctttattcaccgcgctagttaccacgttgaaatggatgctagcgaaacgggcaaaggcgcttatcctcattacatgctcaaagaagttgatgaacaacccgctgtcatgcgtcggttgttaaacgaatacgtgacggctgatggtcagattaagatcaacgctgatttattaacggcgctagaagcagcggatcggttgtacattgttgcagccggaacgagttaccatgccggtttaatcgggaagaccttgtttgaaaagttggctaagaaaccagtggaagtccacgttgccagtgaatttggctaccatatgccattattatcggcgaaaccattttttatctttttaacgcaaagtggtgaaaccgccgatagtcgccaagtcttggtacaaaccaatcaaatgggttatccaagcttgacgattaccaacagccaagggtcgacgctctcacgtgaagccgaccataccttgttgctacacgccggtcctgaaattgcggtggcgtcaactaaagcttacaccgctcaaattgcggttgaattattcttagcagttgccttaggccgccatcaagaacaggctgttgcacttgaatttgacgttaatcatgaattagcattggtcgcaaccggtatggaagccgtcctaagtgataaggatcaaattgaagccttggttaaacactatttagccacgacgcgtaacgcgttttatatcggacggggcacggactatgcgttgagtttagaggctgccttgaaactcaaagaaatttcgtacattcaagcggaaggttttgcggctggcgaattaaaacacggcacgattgctttgattgaagatggcacaccggtgttggccttcttaatggatcaatcgaccattgaccatactcggggtaatctccaagaagtcacggctcggggggcgcaaacgttcacgattgtcagtgacgctttcgcacaaccaactgatcagattgttttaccacaagtcaatccgttgttaacggcgctagttggcgttgtgccagcacaattaatcgcttattatgcgagcttacaacgcggattagatgtcgatcaaccccggaatctcgctaagagtgtgacggttgaataattattaaaagccacaataaaacccgcttaatcagctgattaggcgggtttttattgtggcttatgaatgggtttaaaccatttgatctgtatcgtaagttgcacggggaccaccgacgtatttaggccgggaacgaagtgcggtcacgtgagcggcgcccaatgtttgtagtgtcggacggaccgggacttggacgaatttaacgtgcatcccgattgcggtatcgccaatatcaatgccggcttgagccacaatatgttcaacctcaactggttgttcgaattgatcgaaagcggcaacggaacaggccccaccagcgtgcatcgctgggacgaccgaaacgatttcgaattggcgttgttgggcgaccgtcttttcgacgactaagctgcggttgatatgttcacagccttgaacggccaattgaatttgccgtggttttaaaatagctaataaggtttcgataatgaccgcacccgtttcttggctcgatgattggccaatctgaccgccgacgacttcactggttgaacaccctaagacgaaaaggtcgccggcttgcaggtgagcggcttctaaaacatcaagcgtgatacttgttaaatcggttttgatttgcgttaattgagttgacatctaaacactcctaagaattaaataattgtggtcgcgctttgtacagactagcggttaacggaatggtgaccgcgattccgaacccgttttgaacgagattaccaattagtgaggcccatccggcggtccaaccaaataaccaactggttgctaggaaatagccaaccaacatgacgaggctgccacacagtaaggcttgtaaaatagcgattggtttgttgtgtcgtttggttaaataaccgacaacaaagccttgagtgccgtgaatcactaatgaaaagagacaccattctggataaccggagaggatatcaatcaataggccgctgagggcgccgaccgctaaaccaccgggattttttaataggatggcggtcgtgtagataccgacttcacagagcgtgacaaaccctttggtggcgggaatgggaatgatgaacagtaatgataaggcgaccgtcaaggcggtcagcatcgcgattaaagtaatctgtcgtggtttaaataccattagtcacaacctcttttctgataatgattcacttgccaaacattgcccaattgatggcgcaagacaatcccgttttgtaaggattgataaacataatctttcgccgttttaacggccttttcaagcgattgtccttgtgccaattcagccgtaatcgctgcggaaaaggtgcaaccggccccatcaaccgttgatgtgtttaagcggggcccttcgaaataggtttggctagttgatgtttgtagtaaatctaaagcggtttgaccaggtaaccgttggccgcctttaatcacaacattttgaggaccgagtgaacgaataatggtggccgcctgttctaattcagtacggtttgtaatttgggaaagcccacttaattgacaggcctcaattaaattgggggttacgacaagcgcgcgcgggagtagttgtgttttgaggatttctaaataggattgtgaaggcgttaaggtgccttccttaaaagccagtaccggatcgatgattaattgtagttgcggttcagtagctaagcgcgcaataatcagtttgagcgtcgccacatcattaatcaagccaattttgacataggtgattgggacgtgggctaagacggcatcgagttgggttaagacggtttcactcgcgatgttatcaattgtgaattgtcggttagcttgaaccgttgctaaacaagtgacaacacttaaaccaaaggtcccgagggcttcaaacgtttttaaatcggcctggagccccccgccagctaaagtgtcagagccggcaatcgttaagatgttggtcatcgaatccctcctagtagttgaatagatttagtttaacgccaactaaaatgaattaaaacagccaattggcttgtttttttaccaaccaatttatacactaggattagaggtgattaaatgattgattggacccgttatcctttaaatgaaaagcccaaatatcgtgccttgcaacggttaattgaagcgttgattcaacaaggtttgttgctagctggggaacaactaccagctgaacgccaattagcgattcagttggggcttaatcgctcgactgtcgcgcgcgcgtttgatgaattggcgagtgctggctttttggaacgccaggtggggcggggcacttacatcagccaagcggcattaacgcaaatgacccataaacgggttaattggcatacttatttaacgacgcaacgccgaccgaaaggccagcgtattcgtcaacaataccaggcgctgatccaacaagcaccggccggtttgattgatggtttctcgagcgatttaccaacggaattagtcccagcttttcaattaccagcgttaaggtggaccgattttgtcaaagcgcaagaattggaaagacctaatggttatcaaccgctattagcggccgtccaacaacattattcatcaacgctaacggtgtcgcaattgttgattaccgctggtgcgcaacaatcgttattattagtgttgcaaggtttactgatccccggagaggcggtggcgattgaacagccttcattcttctatgacgcggcgatttttgaagttgcgggtgttcgaacctattcagccccgtgtgacgctgaggggatgttaccggccgaattagaacggttgattaaacaacaccgacttaaattagtgattctaaacccaaattatcaaaatccaactggccaagtgatgggtctaaagcggcggcaagcattgctagcactttgtcagcaatatcaaattccaatcgttgaagatgatgtcttcggctggttgcattttgaacagcgcccattacccacattaaaagaactagatccggaaaatgtgatttacattagttcgttgtctaaaattatgggcagtagcatgcggattggttggttagcggccaccccgcaagtcatccaacagttagcgcaaatccaagctgaaatggacgttgtgccaagtattatggcccaacaaatggtgaccttagcgatggctgagccacaatttaagagccaattgcagcggttgacgcgactactaaaagctcgtgcgcaggcgacttatgaggcattaacaacggcttttcctgaatggcaaattgaacaaccgcgtgggggttattatttgtgggtccaatatggtgaacacccgcgtccgctaaccgactttattaatgaacgggtgatggtggcgccggggatattatttggcagttcaattgggacctttaggttaaattttgcgcggttagatcacgtggctttaacccaattagtagaacgactacgactcatttttgacatttaaggaggtagactgatgactgaaccctttattcctgaaatttacacgccactcaaaacaagtgtgattggcccgccggcgattgctcggcaagttggtggtttaaaaatattaggcaaaaaaattaagacgattatttttacaaccgatgtggcgattgtcaataacacgaacgcggatgcagtcttggcggtttatccgtttacaccacatccggccgtcatgaatgcaatcagtagtgtcgccaatattccagtttttaacggcattggtggtggcttgacgggcggccagcgctcggcctatatgggattattggccgaagccgcgggatctatcggtgtcgtcgttaacgcgcccacttcaattgaaacgattcagcggattaacgccgtggttgatgtgccgattgtggggacagttgtttcagcgcaacaagactatacaagtcaaattgccgcgggtgtgtcgattttaaacgtcagtggggcggctaagacgccggcgattgtccggcaaattcgtcaagattatccgaccattccaattatggcaacggcgggtaaacaagaagctgatatgttagcgacgattgcggccggtgcgaatgcgttgacctacacgccacccactaatggtgaattgttcgctaaaaagatgaatgattatcggttagctttagaatagttgacgaatcacgtgtttctcgctagactgaatctattgactaaggaggactttttagatgattcgacaagcaacagttgctgatgccaaaagtgtattaccgattattaatatcgtatttgaagaaatggaaatgccgctctttcaggaaattccaattgaaaatctttttaaaatattaaaacaagcttttgagatgccagaatatcggtatagttatgccaatacgctggtttatgaagaagcaggtcaaatattagggattgcagttggtttcccagaggctaaggaagccacgattgatgatgttttagcaccgttattcccacaaatcgggttgccaacctcgacgcgcttttttacggataaggaagtgcaagtcggtgaatggtatctggatacgctagccgtcagtgaaatggcccaaggtagaggggtcggaacggcacttttgaaagcattacctgactatttaaaagcgcaaggtgaaagcttaatgagtttgagtgttgatttagaaaatccaggcgccaaaaaattatacgaacgaatgggttttaacaaaaccgatgaactaatgatcggtgatcatcgatatgaacatatgattaaagaaatttagaagtgctgaactcacggtagcttctgagcattagcctagtttcgtgaatgaagtccgggttatggactttgtttgcgaaacgtagctaagcacaggaagctgtgagtgcaagcacgttaaaatggaagtgctgactcgaacgggttagactttgaggattaacctaaggatacgaattatggttgggtttaaccataatttgaatcctgtcgttaaccggaaaaggctgttcgataagcacgttatcaaagaagtgctgtgggttgcggttagcaactgagcattaacagaaaaatatcgattatctttggtttttaagataattgatatttttaggttaagcggaagttgttgcaacccaaaagcacgttatcaaagaagtgcagtgagttgcggttaacttctgagtatctaacaccaaaaaagcgacgattttccaattcggaaaattgtcgcttttttttagctgttaggacgcagagttaaaccaactttgcgcaagaaggctttcggttggctgtaagcccaccggttgagcaccgccgcaatcaagatgcatggaatcagatcagcatcatcactgattgtcagttggaaagccgttccggtactgatcatgaccggcttaacttgcataatggtttgggtgtggtagacaattcggtattgattctgggttaaatcaccgataattaaccaattaaagtgggtgacatacacgaattcgtgccaaacgccccagatttttttgagatcagcgattggttcttgattttggaaaagttgatagctaggtgaaaggcctagcgacatttgtttaatctcgcctaacacatcaccggagagggtgtataacacaaaactatcttggcgtaagccgtgtttaccatctaaaatatacagtggcttttggtggtcgtcgacaactgtcgagacgccccgtaaagcgttagccgttttttgaatgtataacgttggcatctaatcacatcttttcagcttgttgattgatatcctgagcgtgatggatggcgcgcgcaaccccatctaagacgttggcattggtttgatagttggcaatccctttaatcgtcggcacggcattggccatcgcaaccccaatcccagcaactttaatcatcgaaaaatcatttaagttatcaccaattgacattgtggcttcgatgggcacgttttgactgtcagcataagcggctaaggcaatccctttttgcgcatcaacgtggttaatttcgatgttgttgcttgaagaagaggtgacaattagctggctctgttgatcacaaagttctttaacgggggttaagtcgggcgttgtcgcgttactaaaggcaatcagcttatagattttaatgtcaggatcagttaataatttggtataaccatccgttacgtaattaatattcatcaactcaagtcgtgaagcggaaagcgccacggcaattttgtagctcgtgtcgggattcaggttgactaataaatcagcgacgttttgaatgtggtggactttactatcagaataattgccctgattagtcgctaattcaaaataaataccgtgggcgtgtaaataatcaattaaggtgcggacggtatctttatcgatggcaacgtcgaaaactgattcgccagcttgattgaaaacttgggcaccattcatggtaatcatggccgggatttgttcgagtccggttaataaaggtaggacttcgtggcgactacgaccagtggcaatcacgaattcgatattggccgtttgagcggccttaattgcggttaaattgccgtcagaaatttgcattttatcatttaatagggtgccatccatgtcggatgcaataattgaaatcaaaataattcctcctgtcaccataataggcgatacttaactacatattagcatgcaagtgcggtttcttctagcaacttgcgttaaaacacgataaactgttctgtgaggtgagatgatgaaaacaattattcacaatgattggcagacggtattagcacctgaatttgaaaaaccgtattacggccaattgcatgcttttttaaaagaagaatatcaaacaacaacggtttatccggagatgcaccatatttttcaagcatttgaatggacgccatttaaagacgttaaagtcgtcattttagggcaagatccttatcatggcccgcatcaagcgcacggttgcagtttttcggttttaccgggcgttaaagtgccgccgtcattacgcaatatttatcaagaattaacaacggacgtgggttttcaacccgtcaatcacggttatttaaaggcgtgggcgactcaaggcgtctttttattaaacaccgtcttaacggttcgtgacggacaggctaattcacatcgcaatcaaggttgggagcagctgactgatgcggcgattgcggccttgtccgagcgcggtggcgtggtctttattttatggggcaatgcggctaaggctaaacggactttgattgatgaacaaaccaatgccgttttaacggcggttcatccgagcccgttatccgcgtaccacggcttttttggaacgaaaccattttcgcaaacgaatcagtttttagagggttggcaccaaacgccgattgattggcaactcccgttaaatgttcaaaaagatgaagcgctatcataatttacttgtggcagcattagaaacgttgtatgattgagtagtattcttaaataaaacgcttttatggaggtcactgttttggatttatttgaaagtttaaccgtaaaaattgctaacaaaaattataaaattgtcttccctgaaggcactgaaccccggattattggtgcggcagcgcgtttaaatgctgatcgtgttttgaagccaattttattagggaatgaagctgatattcatcaaattgcatccgcaaaagggttcaatttggcggggattaccatcattgatccagcaacctatccaagcgaaggcttcgctgcaatggtgacggcttttgttgaacgtcgtaagggcaaagcgactgaagaacaagcccaaacgattttaaaagatcctaattattttgggaccatgttggtttacatggaccttgcagatggcatggtttcgggtgctgttcattcaactggtgatacggttcgaccagcacttcaaattattaaaaccaaaccgggcgttcaccggacgagtggtgcgttcattatgcaacgcggccgcgacaacgaacgttacctattctctgattgtgcgattaatatcaacccgaatgcccaagaattagctgaaattgcggttgaatcagccaaaacagctgaattatttgatatcgatcctaaagttgcgttgttaagtttctcaacgatgggttcagcacgtggggatgaagttacgaaagttcaagaagccactaagattgcgcatgaattagccccagatttagcaattgatggtgaattacaatttgatgccgcatacgtaccagtggttgcgaatcaaaaggcccctgattctaaagtcgccggccaagcaaccgtctttgtcttccctgaattacaatctgggaacatcggttacaagattgcccaacgtttcggtaatttcgaagcgattggtcccattttacaaggattaaacaaaccaatctctgatttatcacgtgggagtaatgaagaagacgtgtataaattagcaattattacggccgctcaagctttacaaacgacataaaaacgatgtgattacagagacacaattcgcttagaataaagccgattgtgtcttttttgcgtgatgtggtattggtagtcgacgtaactttctgtataatggatacatgatgtcagggacaaggagctgtacaaataaatgcaaactaaatttaaaacgaatacaccagaagcgacaattgaaatcgctgcgcaactcggtaaaaatctacaagcgggggacgtcatcctactagatggcgatcttggagcgggtaaaacgacttttacgaaagggttagcgcaggggttagggattaaacgctacataaaaagtcccacgtttacgttaattcgtgaataccaagaaggtcggttaccgttatatcacatggacgtttaccggttagaagaaaccggggctagcgatttaggtttagaggaatatttcgatggtgatggtgttagtgtgattgaatggagtcaattcattgccgatgaattaccggctgattatttggtgattcattttaataaggtcgatcaagtcgataatgatcgcaacttggtcttagaaccacgcgggcaacgttatttagcgttagttcaaactagttttggcgattaatggggtgattatccggcgaattgccgtcagcgatgcggcacactatcgtgaatttctacgccggattcaacaagaaacgaacttagtgccggttgccgtcgaggaaacggaatggaccgtggcactatggcagttaacgattgcatcgattttagaacaaccgcaagaccaatgttgggtggccactaacgaccaacaaatcatcggggcggcccgcttagttagtgcaccagaaccggggttgcggcacatcggtgaattgagcattgcggtcgttcaagactattggcatcaatcgattggcacgcagttaatgaccaaattaatggacgcggtgcaacaagccgcaatgccgcgtcgtctggaattgaccgtccaagcgcggaatacgcacgccattgcgttgtaccgtcagtttggctttactgtcgaagcagaattaacggccgggtatcaagagccacaactcggctggctgccggttttacaaatggttcaattaatcaatattggatagagcaaggggatttttgagttggtacaaaatagaattaaagggatttatttggcgattatcggctccattttttggggcgttcaagggccggtctcacaatggttattcacggatacgcaaattgcaccagaatggttgatgggcgtcaaaatggggctttccgggattttcttgattggttatgcgctgattaaacaaccgcgagaagtctttaccatttggcgacaaccaaaagatttagggcgattattcgcctttgctttgttgggattatcggctgttcaatacttttattttttaacgatccaagccagtaacgcaccaaccaccacgatcttgcaacaacttggcacgattatgatcatcatcttgagtctggttttataccgtcggggaccgagtcgcgcggaattaatcgccgtcgtcatcgcattattggggacgtggttgctagtcaccaaaggccagctgacccatttagcgatttccgggagcgcactaggcttagggctatatctggctttttcaggggccctcaacacgttgattccggtcaaactatttcaaaaatacgcgacgttaattgttgtcggatgggcaatgctgattggcggcgtcgcttttacgatcattcacccgttttggcgcgcggtgccaccgttgaattttgcgacggtcgccagtgtcctattcatcgccatctttgggacggcactggccaatgtttgttttttaggcagtttacgctacttaacgccaaccacggccggtttattgaatacgtttgaaccattggcggccacgattggcacggtccttttcttgaagaccagtttgaatgtctgggaaatagtgggcggtttattagtgattagtaccgtttttattttaagttggtcacctaaaaagaagataagttaatatagtgaactgatttatggtacactaatagatggagatagaagcgtatttcattgattgaaatatcaaattgttacagcttgtttactgaaaaatcaatttttgctttaatctaccattcgctaaaaaggcgtccctcaattgagggacgccttttgtcatgttcaattaaccaattaacttagtcgcttgttttagtggttcaacgccaaagtcgttggcctctttaatcaggatttgcgcacaagcgatactatcggcgagtgcgttatgatgattttcgagcggaatggctaaattggcacagagggtgtttaatttgtggttctcaaattgcggatagagccgccgactggtttttaacgtgtcgagcgctaaataatggggttcaggaatatcataatgttggagcgtgctccgtaagaccccaatgtcgaagttcgcattgtgagcgacgactaatcggttaggcgtaaagaagggggcgatgtgcggccaaacttggttgaatttaggtgcttgggcgacatcggcttcataaatgccgtgaatctggctatttcgcgcactaaaataggtctccggtttaattaaggtataaaattgatcgacgatttggttgttacggacgaccactaaggccaatgaacaagcactgtggcgttggccattggcggtttcaaaatccattgcaataaaattcataaaaacgcctcactttgataatcggtttgcttagtttaagcgaataaatcctgggtgtcaagttcgatgggacagtgatcggaaccaaaaatgtcgttgtgaatcttggcgtcgattaaacgagattggagattgttagaggtgatgaaatagtcaatccgccaaccggcattgttatcgcgtgcgtggaatcggtagctccaccatgaatagctgtcggcttggtcgggatagaaatgacggaaactatccgtgaaaccactagcaagtagcgttgagaaggcttgccgttcttcatctgagaaaccggcgctgtggtgattcgtgcgatcattttttaaatcaatcgcttcgtgggccacgtttaaatcgccacataaaatgacagctttttgagtcgctaattggttgacatagtctttaaaagcggcttcccaagttaaacgataagggagtcgtttcaattcaccttgcgagttgggggtgtaacaagtgataacgtaaaagttggggtattcgagggtaatcacgcgcccttcatgatcatgttcgggttgattgatgccgtaagtcacctggaggggctcgtgtttggtgaaaatggcggtgcctgaatagccctttttttcggcatagttgaaatattggtaataaccgggtaaatcgagttcgacttgaccggcttgcatcttggtttcttgtagacagaaccagtcagcctctaattgattgaaagtcgctaggaaatccttttttaagactgcccgcagaccgttgacgttccaagagattaatttcatagtctcgcctcatttctaatccctattttaccgatatttcgtgtaatacgcaaaaagtgttgactgttcaattgccgtttcgtttgttaaactagagtaagattatttttgagaggaacgacagccgtgtcaagtcaaaatcaggcgtttttagaagccaatcaaaccattaatattaaagtcaacgaaccattaagtcattatacatttaccaaaacgggtggcccagccgatgtgctcgccttaccaagttcagtggcagaagtccaacagttagtgaccactgctcatcaatttgaattaccgattacgattattgggaacgctagtaatttaattgtgcgggatgcggggattgccggattagtgattattttaacggcgatgaatcaaattacggtcgatcaacacgtaattgtggcccaagctggggctgaaattattcaaacggccgaagctgcttatcaagcaagcttgaccggtttagaatttgctgccggaattccggggagtgtcggcggggctgtcttcatgaacgccggggcgtatgaaggcgaaatcagtgatgttttaacgtcggcagaagtgttgacaccggacaatcaagtcatcacgatgactgctgctgaattagaattcagttatcgtcacagtttaattcaagaaaacggcagcattgtcttggctgctcgattcgatttaccaaacggggtagcaacacttattcgtgagaaaatggatgaattaaacgcgaaacgggccgctaaacaaccattagaatacccatcgtgtggcagtgtcttcaaacggcccaagggttactatgtggggcctttaattcaaaaagcgggtttacaagggtaccaaattggtggggcgcaagtgtcacaaaaacacgcgggttttatcgtcaacattgatggcgcaacagccaccgattatttgacgttgattgcccacattcaagccgtaatctgggagcagtttgaagttcggttagaaccggaagtccggattattggtcgaacagtctaaaaattaaaaagaagcggtcggatttagcgacggcttcttttttagaaatcaagggagtgattggatggccattatcgaagccattatattattaatttctttggtgattattgccaacattattggtcattatatccccaaattaccagtgagtttgattgagattgtcttaggtttagcggttgcggtcttattttcctttaagattccgttgaagacggattggttcatgttagtattcgtcgcgccgttattatttaatgacggtcgacgtttcccgaaaaaagaattgtgggcgctccgggggccgattatcggcaatgccatctttttagtttttatgaccaccttggtgggcgggttagcgattcatgggttagtgcctaagttaccgttggcggctagttttgcgttagccgcgattttatcaccgaccgatcccgtagcggtgcaatcaatttcggaacaagccgctttgccaccaaaagtcttacatctagtcagcggtgaaagtttaatcaacgacgccagtggtttgattagttttaaatacgggattgccgccgcagtgacgggttatttttcattacaaaatgcggctggcgattttatctatatcagtattgtcggcgcaatcgcgggggccgctatgatgtatctgatccatttggtgcgtctgttcatgttgcaacaggggattgacgacgttgtctttcataccgtgttgcagttgctcaccccgttgttgatctatttaattgtcgaagatggattacacgcgtcaggggtcatcgcggtcgtcgttgccgggattgttagccattctagtcgcaacgtctttttagattttttaccagaattaaaattagtcaccgaacaaacttggtcaatcagtgtctatttattaaacggcattgtctttttgattctcggtattgaattaccggtggcgatgggcagtaccgtgcgcaatccattgattgccacgagtgaagcaatcttgctagtttttgccgtttggttaattctggtgttggtccggacgttatggactttttcttatttgatatataccaataagagtaatccaagaacgttgcgggctaacgccaaaatttcaattttatcaggtctatctggggttcgcggggcgattacgatggccggggtcctctcggtgccgaccgtcttagcggacggctccgcctttcccgaacgggggttaatgttgttcatcgctgccggggtgattatcgtcagtttagtgatggcgattatcttgattcctaaattaaccaaggtcaatacgccaattgagttacggggaacacaactggatagtgaggttgacgtcgaggatgaagcgactgatgaaccccagtttttgagtgaaacggaagctaaaatttacatttaccgggtggccgttggtttgattgaagcgcaacggcatatcgataataaccgagcagcgctggatttaatcgcggaatatcaagtgatgattcatcgtttagagagtcaacaaaacgacgcgaatgaaggcaccgagttaccaccgctcatcacggaagaattaattttgcgtcaagtcgccttggctggtgaacgtcaagcattagacgggatgtggcaggccaaagaaattagcgcgaaaacgtaccggcacggtcaacgaaaattgaaacaaaaacaggtccggttagcagtgatcggctccaactttaattggcatcacgttcagctcctattttatcgactggtaggggcagcaaaacattttggttggtggttagtaccacacaagcaaacggccaaaattgcgaccgaatggcaattaacggaacgtgagatggcgaaggcggggattaaggcgttatcggctttcttgaaacaaccagaaaatcgtcaacaacattataatcggcaagtcatttatcaaattatcatgcgctatcgtaatcagattgaaaacatgaagagtctcggtcaccgaaagactgatatctatgaacgtcaattgcaaaaattgcggattaaagcgttgaccggtgaacgaacggcgattcagaatttattagagcaacacaaaatttcgtgggcgctggccgatgaattacgcaagaatatcaattattcggaaaacgcgttgattctagccaatagtgatgcggaagaataggataagtgctgactcaagttggtcagactttgagaagcacgttaccaattgcctaccaagttaaaaaaagagtatcctgaatttaggatactcttttttgatttgaacggaaattgatgagttatggcgcgcgttaacgaaggaaataagtttaccatctaggttgttaggacttttatcacagtcccttttttaaattagaataagcgacggtggcggtagaaacgccaaccaaaatgaccaatcagactcgccagaatggtcagcccggaaattaacaagccgagttttaaataaggcggggtataggtgaactggatcttgtgctggccttttttgaggggcacagctaagaaattctttaaagcttttttgggtttgaccgtttggccatccactttgacttgccagccggacgaatacggaatggtggtcatcaagacttgcttttgtttggtaatcttaatggtccccgtaatggctcggtttgagaagtgtctgattttgagcggattggcttctagtttttggatggtctgttggaagttttgcgtatttaaacgatagagattaatattctgcaaccaaatctcagattttgaaaaggcgaaatcaagggtttgggtttggcccttaacgtgattcgctaagttgacgacgactggatctcggaaagtgtcatattgttggacggtttgtccgttgatcgtaatccggacggcatttttttcaagacttgaaccaagcgtcagataataagcgtcgttggtggttggcgtgaaggtgtagatgacatggccatcttttttagaatcaattttcaaaaacgtttcgttcagtttcggtttttgtttcacattctgataagtcaccgtgttgaaaaattcgaggttaaataactgttggttaacgccagtttgtccggatagttcggcagcaatattattctgttcaatcaacggataatcggccgtctttttatgtttcagaatttggttggaagcggcaaaaccgagcgctaatgcattcggattgtgataaatctcaatatcgccggcctttttaatcggtgtgtaatcgactaaatcgggtttataactcgtttttggaaccgtcgcttggaccgtctgactattcaaataatagcgatagcttaaaaaggcgtcggtgaattcagtttgattggtgtccgcgacgaagccatcgccagctggttcaccaatctggcccataaaattgggatagctcggttccaacattgaattgaaatgggaaccaccaaagtaatcggcttgcatcggatcatttttggtccgcataaaggtcttaccgatccgttggaatgccgctttttggggagtggtttgaattgccttttggagttgcaccgtataatcagcgtaatctttctgggagacgtagctgatctggttcaaactgatataagcgttggcggtcatttcgagcgtgacggtgattaaaatcaaacaacccaccggtaacttaaagtggcgcggaatcagtaagacggctaaactcgccagaattaaaaaaccaatactgagatacacttggtagttatccagtgcggtgaaggatttaagatgttttgcggtataaccgataccgctgattaataataggaaggtccacaagagtaacggccagttcatccggggttggtagtggagtcgttgaaccgctaagacgattagccagaagctgatcacgtatgagaaacggtaaggataccaaacggggaattgcatgccgtgccacaataaatctaacggttcaaaacaaagcgagagccccaagaagccggtgactaccaaggcagcaagtcggtcttttaggggaatctttttggtgaagaagtaggctaaaaagagaatcagcactaaactaccgacaaaaatattcggttcgcctttgggcatttgatcgaaattaaagttaccgacaattagttttgataacattttgaggggattatattcaagtttccaatgaattttttgaatcgtgtattgccctttactctgcgttaattgatagaaggtgggtaataataaccaggcggccaataaaccagccccgagtgaaccaccgatgaattttagaatggagcggccagtttgccgccaagtggtatgatggcaaacgagcgtccaagcaaaataagcaacgacgaatagacaaaccatgtagcccatgtaataattgacgacgagtaaaatagcgaggctgatcgggtataaccaaaaatggcgtggtttaaagagttgttcgatgcctaagacgattaaaggcaaccagattagggcgtcgagccacatgatgttaaattgattggcaatcgcaaatccggatagcgcaaaggcaatcccgaaagtcgggagccaccagccagtggccagtcgggttttctttaaataataagccatactgagactcgtacagccggtttttaagaggacgattaaccagaccccgaaactgagccatttaccaggggttagaaggacaactaggttgaaaggactcatcagataataagcccaaacgccgagcatatcgccacctaaacctttggcaaaagaatatagaaaagtgctgggatgttgaagcaaggttgttctaaaataggcaaaaaaatcaatgtattgctggcctaaatcgacggtcataatggtttgacccccaaaaggaaagacgtggcgcatgatgccgtaaataaagagtaggatgacgggaagtagaaaactaagggttaaaaacccgtgccggtgccaataattgtataatcgagtcacaagaatcctccaattaataaaaaaatctaaaaattagtttacaaatcagcttttccatattaaaagctgtaaactagcaatgtagtgtttagtgtccttagcataccataatcttggtatcatttagtgatttaccatagcttgttctggattattttgctaaacttaaacaatgagaattctaaaatagaatcaactggataggagcaactgaacatccgtgaatattattaatcgaaaacctaagaaaaaacaaaatagggagaaatcacacatcccgtttcgcttaaacttcttgttcttcattgtttttgctttatttgccgcgttgatcattcaactggcgcgtttgcaagtgcttggcggggccagttatcaagccatggtcaacagtacggataaaaccatcgtgaccggcaacgttccgcgggggatggtgctcgattctaaagggcgtgtgttggtcggcaatagtgctaaatcggccatctcatatacgaagaatatgaatgttttatccgataagatgtacaaagaggccaacgaattaacccaatatttgacggttaaaacagatacgctatcaaagcgtgatcaaattgattactacttaagtaaccctgctaatctgaaaaaatggaacgctaagttgccgaaatcgaaaaaggtcgcggccgatggttctgaactctcaactaaaaaggtttatcaatcaaccatcgatttagtcgaaaagacgtttaccggattatcagatgagcagaaacaagcggccgccatctttaagattatgagtggcgcttatcaattatcgacggtctacattaagaattcggacgtgaccgataaagaaattgctgaaattagtgaacatttaaccagtttaccggggattagtgtcgggacggactgggaacggtcgtatccgaacggttcatcgatgcgcagtatcatcgggagtgtttcaactgaatcccaagggttacctgaagatagtttgaaatctttattggcccaagggtattcacgaaacgaccgggtcgggaccagttatttagagaaacaatatgaaacggtcttacatggatcgaaatcacaatccgaagttgaagtcagcgcgaataatcaaattttatccagcagtgtgcttttcaaagggcaaaaagggagcaatttgaatttaacgattgaccagacttaccaaacccaagtcgaagcggcgttgaagaagatttataaccaagccaagactgcgggagcgaccacctattcagatggggcgtacgcggtggcgatgaatccgaagaccggcgcgattttagcaatggctggtgaatcaaacgaccgaacgaccacagaagtttctgatgatgcacttggcgtgattaaccatacgtttgtcatggggtccgcggtcaagggcgcgactgtcatgggtggtttgatggatggcgtgattacgccaactgacaataccttgccggacacaccgatttatttagtcgggacaccggtcaagaaatccgtttatccagtcggcacgtttagttcgttaacggcgcaatcagccttagaagtgtcttccaatatttacatgatgcatttaatcatgaaagaagccaatgctgactatgtagccaattcaaaaatgaacatgagtccggatatcttcactaaaatgcgcggttatttcaatcaattcggattaggtcaaaaaactggcattgatttgccgggtgaagccaaaggaattgaaggggcaactttggattcaggtggcaataccttagtcggttcggcacttgatttatcttacgggaactacgatgcctataccttaattcaactcgcacaatacatttcaacgattgctaatggtggcaaacggatgaaaccttacttggttgattcgattcaacaaacgggtaccgatgggtcattaggtaagattgaaaccaaaacagcaccaaccgtcttgaataccattgatgcaccgcaatcttactttaacgtggttaaagaagggatgtataacgtcgtcaatggttccaacgcttggggcacagcgcatacgttgaaagatatcaaaccaacgttagccgctaagaccgggacggcacaatcttttgcccggacggatcctaacgattcaaccagtgcacaggttgaaacagtcacctcaagtctcgttggttttgcaccgtatgacgatccacaaattgcgattgcggtcgttttcccgaacctcacatcggatgatggccattacaataccttgctagcgcgcgagatgattacggattattacaaactaaataatattaaagaatgaaatatttagaaataaccttttcagatactataaaaaatggtatgatattatgagtctaagacttaaacactagaaattaattaacagcttggaggctatatcaatgcgcgtacacattacaatggaatgtacagaatgtcacgaacgtagttacttatcaaacaaaaataagcgtaacaacccagatcgcttggaattaaagaaatattgcccacgcgaccgtaaagtgactttacaccgtgaaactaaataattagttataagagttagggcaactgccccggctctttttttgttaattattaaggaggcctatcaaatgttgactaagaaagcactgcgccaacaacagattcaacaattagttgaattgtcccaacaaccagcacttaaacaggctcaagaagcgacgattttaaaacagttggccgcatcaagcgcgtttcaagcagccacggtcatcggaatcacgttgagtcaatcaattgaatatcaaacgcaaccggtgattgaattagccaggcagctcggtaagacagtggtcgtgcctaaaaccttaccgaaacggcaaatggctttctatgaattaaccccgacaaccgaactgattaaaagtgattttggggtgctcgaaccggtcgccacggtggttcgtgttccggatttaatgattgtccccggactcgcttttacggatgatggttggcgtttagggtttggcggcggttattacgatcgctatctggcccaaaatccgatgccgaccatcgcgttggccttgaaaccacaacaaaaagcggcgtcggactggacagttgacccatttgatattagaatcaatcaagtaatcaaaggttgaaaaggagaagagatgaacattaaaagaaaattgaatcaatggcgtgatcaaccattcgtggcttacggcttagtggttattgcgattttgatgttttgtatcagatttgtgttacctgccgtgacgttccatggctttgtttcggttaatactttattaacgggccagattggctcatttatcctatccgcctttaatgaactaagtgtttcaggcttggtgatggacggcttgattttatattttgtgggtggccaattggaacaattagttgggcattggcgaatattagcgatttacctattgagtgggctagctggcttagtcacgcagggcctctttttaggaacagattcgatgaccacgaccatcagtatggccgttttaggtatttttggtggctttttgatgctcggggatgcgtttaaagaaagcgcggttcttggtcaagttgcccggcaatattggctctttttaattttgtcagtcggcttacaagtgatttttaatcggaatgccgtctatggaatgcttggcgggattctcggtggttttttaagtgcgatggcgcttggtgcaccaaaagtgggtaaaattaacccggtaaaccggataatcagtggtgtggtttacgtggttgcaatcattttattcgcatatttgggtatgaatcgttaacaattttaggtatactattaaaggtgaagttgatgaaaactctttatgatgtgcaacaacttttaaaacaatttggcgtttatgtccatgttggcaagcgactttgggatattgaattaaccagtattgaattacgccacatctatgatgcggggttaattgatggcaaagtgtatcgtgatgccaagatggtgcttgttcatgaacaccggttggaagaaaaagaaacatttaatcatgaattattggaggaaaagtttaaatgacagataaaaaattaatcggcgtagatttgggtggcacaactgctaagtttgcaattatgaccacggatggtgaaatccaacaacgctggagtattgagactgatattttagatgaaggtagtcatatcacacctgatatcatcgaatcgattaatcatcatttagatttatataacatggtccctgctgattttatcgggattggcatgggaacgcctggtagtgtcgacatcgaagccggcacggtcatcggggcttataatttaaattggaagacaacccaatatctaaagcgtgatatcgaagcgggtactaaaatgaaatttgcaattgataacgatgccaacgtggctgccttaggcgaacgttggaaaggtgctggtgaaaaccaacccgacgttgcgtttgtcacattaggcaccggtgtcggtggcgggattgtcgctgacggtcatttattgcatggtgttgcgggttccgctggtgaattaggccacgtgactgttcaaccaaatggttatgaatgtacttgtggtaaaaaaggctgtcttgaaacttacgcatcagcaaccggggttgtccgggttgcgcgtgacatggctgaagaatatgctggtaactctaaattgaaaacaatgttagacgatggcgaagaaatcagttcgaaactggttttcgatatggcaaaagaatcagatgccttggccgttaaagtcgtcgatcgcgtttgtttctatcttggtttagcgttggcgaatgtcggtaatatgttgaaccccgcttacatcgtaatcggtggtggcgtttcagcagctggtgaattcttacgcaagcaagtccaagcttactttgaagaatttacattccctaacgttaagaacacgactaagatccgtttggctaacttaggtaacgtagctggtgtcattggggctgcttcgttagcattgcaacttgatcaacaataattaagttaaaggaagttatgtagatgtttgtcttaggatcaattacaacgtggaccattaatattatcttattactcgttttactttggttagtcggcgattgggcttactacaagattcaacgcaaacgtttaggcggcgaattaacggccgaagactttgaatcaacgatgcgtaaagcacaaattgttgatttacgcgataaaaaagattttgatgccaaccatattttaggggcgcggagtatgccgtatccaatgttaaaacaaaatatgggcgaattgcgtcaagatttacccgtctatttatacgatactgggattacattgagtatccgagcaacgttaaaattgcgtaaagccggttttacagacattaaatggctgcaaaaagggtttgctggttggaccggtaagacgaaacgcaaaaaatcattaaactaaaaaagaacccaaaagtcagttgagtattagcgacttttgggtttttcatttcaaataaaaaaggaccgtggcataaatttcagtatcttgatgttaatggatatgtttcgttgacgcgtgtcagaactcatcactctccgttcaaatcaaaaaagctgattatccttagttcggaataatcaactttttcaacttgatactcaattgataaccaagttctgtcacagctagtactatattaaccttggtgagcagcgtggctcttacggttagcgcgacgacgattatcttcaatttgggattctttttcttcgattggatcaacaacggttttcttgaaagccaataatgaaccagcaatcgccccaactgttgaaattgtaccgataacgaaacctttagcaaatttatgtttcatgataaaacctcctaagatctaattgattcaagctataaacttattatcgcgtatttaggcttgaatagccagtaaaatccattaattagtggggtgaaataatgacaaaagaaaaagtattagtcatcgtggggccgacgggggttggtaaaacagcccttagcctaaccttggcgcaacagttgaacggtgaaatcatctccggagactctatgcaggtctaccgccaattagatattgggaccgctaaagcgacaccggcggaacaagcgcaagcaccacaccatttaattgatattgtcgatgtgcaagaacggtttaccgcgtatgattttcaacagcaagggcagtcgttggtacagcagattcgccaacggaatgcgttaccgatgattgttggtgggaccggtctgtatttacaagcattattgtatgatatgacgttaggcacagctgaagaagccgaagctaattttaaggttcgccaaaaatggcaagcttatttaaccgatcacacgccggccgaactgtggcaaacacttcagcaaattgatccacaagcggcggctaagattccgccggctaatacacgccgagtcattcgcgcgcttgaagtctatgaaacgacgggtgtgaaattttctgatcaaaaacccaatgaattacgctacgatacgtacgtgattgggttgaattgtgatcgaccagttttgtatgaacggattgatcaacgcgtggatcagatgttagcgactgggttattggatgaagctaaatgggcgtaccagcaacaggctgatagtccccaagcggtccgagggattggttataaagagttttacccctattttgatggtcagtattcattagcgcgcgccgttgaactcgtcaaacaaaattcacggcattacgccaaacgccaattaacgtggtttagaaatcaaattccggttcattggtataatttagtggaaaatcaggctgaagatcttgtccgtattcaacaggatgttcaagcttggttagaaaagtgaggaagaatataaatgagttggcaaaccgatttagcacccgaattacaaactaaaattcaagccgttgacgcccaaattgctccccgattgacggcgttagacgaccagattatcaataaccaagctaaagtgctacaggcttttcaagatcagtcaatttcggaaacgcatttaaatgggacaaccggttatgggaatgacgatcaaggacgcgacaaactggaagcggtctatagtcaagtctttgggactgaagacgcactcgtccgaccccaactggtttcaggaacgcacgcaattgggacggccctgttagggatgctacgcccaggggatgatttactttatttaacgggtgaaccctacgataccctgcaagaagtcatcggcatcgctggtaacgggattggttcgttgaaggaataccaaattggctttgattacgtgccattattggcagatgggagtgtcgatttcgaattagcgaaaacgatgattaccgctaaaacaaaggtcattgcgattcaacgttcacgcggctatgccgttcgcgatagttttacggtcgctaaaattgcggaaatggttcgtttcatcaaaacggttaatccggacagtatcatcttcgtcgataatgcttatggtgaattttcagaagtgattgaacccacggatgtcggcgtcgatgtcatggccggttcgttgattaaaaatgccggcggtgggattgcccaaacaggcggctacattgtcgggacgcaacgtttgattgaaatgattggttatcgcttaaccgtgccgggtgtcggtgcgagtgagggtgcaacccaaggtaatttacagttaatgtttgaaggctttttcttggcgccaagtgtgaccggtaatgccattaaaggggcgatttatgaagcggcactgcttgaaaaaatgggcttgtcggtttcgcctaaatgggatgcaccacggaccgatttaattcaaaccgtgaacttcggtaatccggatgatatggttaaatttgccggttgtgtgcaagcacaatcgccaattgattcgtttgtgaccccgattcccagtgattttgccggttatgaagatcaaatcgtcatggcagccgggaccttcattcaaggggctagtattgaattctccgctgatggccccatacgggcaccgtacacgctttatttacaaggcgggttaacttacgctcatatcaagttagccatcagtcgtgccgtacagacgacgtattatgcttaacacaaatcaagaaaagattagaccataaattggtttagtcttttttatttttatgataaaatcaaaataaaatttagacgtacgaggaatgtaatggttgagttatcagcgcaacaacagtttgaaacgaatccagatggggtgcaggcttatcaagcctattttggaacgccgacgtacgatgaccgtttatggtttgtattattgacggtgggggtctttcaagtcggcttgagttggcaagcagcagccagtaagttacccgtttatcgcgctgtttttgcggggatgtcaattgaagaagtcgcgcagttcgatgaagccgatgtcgaacgactgcagcaagatgaacggctgattcgcaatccacgtaagattcgagcggtgattcaaaatgcgcgggcgattttagccatccaggcgaccggtatcagtttctccgaatttctatgggattttgtcggtggccaaccgcagctgttattaatgagtgattctggggtgactgagcggtcagcgccaatcagtacgcaattagcgaaggcattaaaaaaacgcgggttcaagtttgtcggaccagttgtgacgcacatgatgatgcttgccggtggcttgttacaagttgcggacgactaagggttattagttgtcggtcaagtgagattgcgcgataataacggtattaagtgaagggtggtcatccaatgacagcaaaaacatttcaatttgatccagaattagtcgttaatcgtttgggatatggcacgatgcaattacctggcaaaggcgtttggggaccggctgaaaatccggaagaagcggtggctgtgatgcaagctgtcttagcgagcgatgttaattttatcgacacagctgattcttacgggccatttttcgcgaatctatatgtaaaagaagcccttaaaacctatcgaggaccgcataaaatgattgcaactaaagtcggttttacccgccaaggaccgggggaatggacggttgtcggtcgccccgaatatttacgccaacaagttgagttgaacttatggtcgttgggactagagtcaattgatttattgcaactgcaccggattgatccggcggtttcgttagaagcgcaaattggtgttttagctgatatgcaacaagagggtaagattaaacacatcgggttatcacaagtgtcagtctctgaattgaaacaagcccaagcgattacgccgattgtttcggttcaaaatcgttataacctgatcgaccgtcatgacgaagcggttttgaactatgctgacgaacaagggattgcgtttattccgtggttcccgttagcgactggtaagttagcaactgatgaaaatggcatcttgatgcaaatcgctaagacccaccaagcccaaccggctcaaattgcgttggcttggttattacagcgttccgacgtcattttgccgattccaggcacacgtaatattgcgcatttaaaggccaatattgccgcgcaagaaattgttttaacgcctgctgaatttgatcaattaagtcgattagcagattaaaagccaaaagaatttgaaccttaaaggggggcgaattcttttttatttttaactgatgttagaaaacctaacatcaaatgttgaccggattaaaagtgactgttatgataaaacgcaagtgaggtgaaatcaatggctgaaaaacaactgagacgtaatttagcggtgttgccaatcgggaccgtgatgaaattaacgggtcaaacggcgcgccaaattcggtattacgaagcacaacaactcgttttaccagaacgaactgctggacaccaacgacttttttcattaaacgatgtcgatcgtttgttagaacttaaagattatttagcggaaggggcgactatcgcccaaattcgccaaatctaccagaagcaggcgcaaaaacggcagcaacctgaattgtcagacacgcaaacccgtcagctactggcccaagaattattgtcggtcagtggtttagttggacaacggtcagcaatttcacaatcatctaaattatattaaggggcgatcggattaatggcacgtaaagtattggcagcagccactatcaagcaattagtagaaacagaaaacgttaaatttttgagattaatgttcacggatatcaacggcattattaagaatgtggaagttccgattagtcaattagataaagtgttgagcaacaaaatgatgtttgatggttcttcaatcgacggttttgtgcgaatcgaagaaagtgatatgtatttacggccagatttaagcacttggttaattttcccatgggaagctgaacacggcaaagttgcccgattaatctgttcagtttacaccgcagctggtgaaccattcctaggcgatccccgcaacaatttaaaaaaattagtccgcgatatgcaagcaaagggttttaaagatttcaacattggacctgaacctgaatttttcttattcaaattagatgaatttggcaaaccaacgttaaaattaaacgatcaagggggctatttcgattttgccccagttgatttaggcgaaaactgtcgccgtgatattgttttggaacttgaaaaaatgggctttgaagttgaagccagccatcatgaagtcgcacctggtcaacatgaaattgatttcaaatatgcggatgccgtcgatgcggccgataatattcaaacctttaagttagtcgttaaaacgattgctcgtaaacacggattgcacgcgacgttcatgccaaaaccactccatggtgtcaacggttctgggatgcacatcaacatgtcactctttactgaagagggtcaaaatgcgttctttgatgaaaatggcaaggaacaactttctgaaacggcttattatttcttagccggtttattacaccacgcccgtgcgattaccgccatcaacaatccaacggttaattcgtacaaacgattagtccctggttttgaagcgcccgtttacgtcgcttggtcaggtcataaccgttcaccattgattcgagtaccccaatcacgcggtttatcaacccgtttggaacttcggagtgtcgatcccagcgccaatccatatctagccatcagtgcgattttagcggccggtttgtcaggcttagaacaaaaattatcacctgatgctggcgttgaccgcaacatctacagcatggatgaaacggaacggaaacaaagtcacatcaccgatttaccttcgaccttgcacaatgcgttgaaagaattagctgatgatcaaatcattaaagattcaatggggccttatctctatcaaagtttcatggattctaaatcactcgaatgggcggcttatcgtcaacaagtgtctgaatgggaacgtgaacaatacctagagctttattagtcgcaatttgtgagtgttttttgtacaatgaacttttaagtaaaggaagtttattcaatgaaaacattagtgattgttagtcacccagaaattgaaaattcaatggttcaaaactttttaaaagcaagttgtgccggactggaagaggtcacttggcatgttttgccatcaatcttagatgtagctttcgaacaagcccaactaaagactcatgaccggattattctccaattcccgctttattggtacgctgcaccggccagtttaaaaaattggttggataccgtcttaaccggcgactttgcgtttaacgggagccaaccgttagcaggtaaagaatttgggctggttgtgtcaacgggcattgccgcaaaacattttcaagctggtggtagcgaacaagcgaccatgtcagaaattttaaggccctatgaactggttgcgcggaaactagggatgacgtatttaacgccattcgtgattcaccaactgggttattggtctgaaacggcgaaacagttattggtcgttgattaccaacgctatcttagccagcaaaactttacgttaacggataaagtcgcttggttccaagcacaattagcccagcggcaagcggtggctgaagatgaagcgcaacagcagcagttggtcttaattggggaacaattagcggaacaaagcgagttgttaaccgatttgaactggcaagtccaaatgattcggcaagaagaaggtgaaggctaatgactgaagaaaattggttacaacaacagattcagcaattacaaagccaagccaccacttatgaagatcaagctttttatcaggcactcggtcaagtcagtcacgaactagcgcaacgaattgaacaacgccaaggtgaattggatggccgcatctggaacgcgacaaaatggtaactgaaatgttgctaagcacaggagtcagtgggattggcacgttatcaattgtctatcaagtcggaaaatccgattatcctgaatttagggataatcggattttttgattgcttaaaaaagaacttgctttcattctggaaagcgcttatattcaagctagattaacgattagtggaggcgattgaaatggcagtacacgactattttaagttcatgaccaatgcaaccagtttaacgggagacgacacggctaattatctattaacgagtcagattccgattgatgaaacgattctaaaacaggctttgggtgatcaggctagttatttgcgcacttatggggatgcgggttatcagtttaagtcagctgctagcttgcctgctttgaaacaattaatcatggccagcactaatttgtcacaagaccaacttgaattaattagcttatcaggattgaatgggttaagaccttaagtgacgcaaaaaaagaagcctaatcattgcgattagacttctttttactatttaaattaatagcgtttaattaatgcaacaaaagcatccacgattgcttggaagaaaccgattgtgtctgggttattcacatcaccgttgtcatctaataaattcatgacattgccgatataagcttctggttgttgaaccgttggcatgtttaagaaaacaagtgattgacgtaagtgatggttggcgccaaatccactgatagcaccaggtgagacgctgacaatttcagcgggtttgttatcccaaacactggcaccataagggcgtgaaccaacgtctaaagcgtttttcaaaacggcagggactgaacggttatattctggtgtcacgaataaaacggcgtccattgtttgcatcttttctctaaacgtggtgtaagcggccggcacttggtcaagatcatcgtaatcttgattatataaagggagatcgccaatttcgatcacttctaaattgaaatcagcggggaatagcttgcttaaattcttagcaacagctttactaaatgaatctttgcgtaaacttccgactaaaacagcgatattttttgacatataaaaacctccagtaatttaacttattttttgtaagtaactttagtatagcacgcaactttttagatgcaactaatgatacttatactttcagcatataaaggtgaagggacttatgcaaataaaacgacttttaagcgaacagatttgaattatgagtgagactaccagtataataaagctaatcgatcaattaattattggagctgacaacatggaaatcaaatggcaagtgcaagccgggcaacagcggagttttaaacagtttttattgggccagggtatcagtcagcgattatacactaaaattaaagcgttacagttaccgctttatttgaatcaaaaaaaagtgacgcctgacagtgtcgttcaagttggggattgggttagtttacagctacctgcagaaccggcagacgagtccgtcatcatcagtcatggcccgctgagcgtaatctatgaagatgagtactggttagtggtcgacaaaccagccggactctcgacgattccagggccgactaaccagactgatacgttgttgaatcggattaaaggttattggcaacaacaaggtgcccaaaatttggtgccgcatattatcacccggttagattacgacacaagtggggtggtcttagttgggaaacaccaagttgcccagagtttattgcaaccgcaaattgaaaagcatcaattacagaaactttatttagcggtggtcgcgggcaacggattagccgcacaaggtgaaatcaacgcaccgattggtcgggtagctacggaaattcggcgccaagttttggcaactggtcaatcggcgcggacgagttattggttgttaggagaaagtaacgatcgtgccgcggtcaaagttcaaattcacacgggccggacgcaccaaattcgggtccatttcagcgatttagggcatccgctgttaggtgatcaattatatggcggaccgcttgatttagggattgagcgtcaagcattacacgcatatcaattatgtttcttagatccttttacacaacaaaccaagtgttttaacgcaccaatcccagaagagattcaaaccgtattgccggctacggtacaactagcagatttagtaaattagtagcagcaaggggcgattggatgaaacattggaaaataatagtagtgggtttaatttgtctgctgattggtgggatgattgggaatgtctggcccgtcaatcagttaaccgcatcgtcgaatcaggcaacgaatcagtcacggcgaccactgatttttgtgcccggttccggtggaacgcaagaaagttataatcggatgttgcagacgttaaatcggactaagcaacacagtattctaaaaataacggtcgccgataacggtgatttgaaggtgactggaaaactgaaatcaggtgataaaaagccgctgatggttgtggcatttgtcaataatgctgacggtgatcagaatgtggcacttcaaacggcgttatttaaaaccacgcttcgtcaacttgagaaacggtatcattttaagcaatttgatggtgtcggttattctaatggtgggttggtgttaacgcagtttgcggaacaggatagtcaccggacagcccttaagcggttaatgacgattggcacgccgtacaatgatttaaacccgaaggcgagtcaaaaaagtgcgatgttaaaaagtttattggccgatcgaaagaaattatcgaagcagttgactgttttttcgttaggcaatattgttgagggtgatagcgatgggattgtaccgattagtagtgttttagcggggcgtcaaatatttacgaatcaagttgcccattttaccacgttaatgaccaatgacccacaagcggcccatacagaactcatcgataatcagacgattatctggtttgtgaaacgggtgatgattaatcgagaaacaccaatttaaggtaatgcaaaggggattagtgagatgaaagcattccaattatttaaacaccagaacacccatttttggcatcattggtggcaatacggcaaggtcgttttgacgattgaattattgatcggtttaatctgtgtgccagtgcttaatctgttagcgaatacgattttaaatttaggtcgggttaaatacgtctcttacactaatctgggtcagttattaaaacaacaaccgtgggtgatcttagctttattagtcattttagggcttatcttagcgttggttttcacccaatttacgttgctattattgggcttttatcatgttcgtcatcgacagacggttacgtttgggaccgaaatgaagatggcggtcagccaaattagacaattgccaattagcgcaatcggtttttttagcttatattttttaatcattttaccgtttagtcaaattggctttaccagtcaattattaagtaaggtcaaaattccccgcttcattttggattggttaattagtgaacatccaatgttggccggattagtggccatcttgtatctactcattttatatttgggtttacggtggttatttgtcctaccgttaatgattctggaacaacaaccgattcgccaagccatgcgcttgagctgggcgaaaacggcgcaccgcagttggggctatgcgcgctacattatgacggttggtttagcggtattggtcgtcgttgggctatcgttcggtggtttgttagcgattcaatcgggactggatcattattggcacgcaggtgcgcttagtggggccatcattaacttgagtttaacccaagtgattagtgtcttagccagtatttacgggacgagcatgattgcattgttaatgttatcggaagttgaacaacaatctcctaattttgccattgctaatcgtgggcattatcgcttaaaacaaggtctttgggtcggatttttcgtcatcacgggtttcttgtttgttggatatagtgttctttattttcaaggtttcttggcgcaacaaccgatgaccatttcccaccgtggggttgataatggcaatggggttcaaaattcgatttcggcattacaacggactgctcgtgagaagccggactacgttgaaatggatgttcaagaaaccaaagatcaccaatttgttgtgttgcatgatgaaaatttgaaacatctagcaggaatcgatcagtcacccagcgacttaacgctagcgcaacttcaaaaaataacggtgcacgaaaatggctattcagctaaaatcgttagttttgatgattactaccgagcggcgcgacaagctcatcagaaattattaattgaatttaaaaaaacgccagcaatgactaagggatttgttaagcgatttgcaacacaatacgggtcgaccattcgtaaaaatggggatttggtgcattcgctggactatacgttaattcaacagagtcgacgggacatgccgaaagtcggggcgagttacattttgtcgtttaatctggttggcgtgccgaaaacgacagccaattatttcacgatggaatacacaaccttgaacgatacgtttatcgataacgttcatgcgcaacataaaaaagtgttggcttggacggtcaacgatgcggatgacatggatcagttgatgttgaaaaatgttgacgggattattaccgaccaattggggacgttgaatactgaaattaaagcgaattttaaaccaaatacttacacgatgcggttgttaaattacatgattgatatgccggctagtcaaatctaaaaaaatagcgtactaaaaaacggctaatctgatgacggattagccgtttttgatttattatttaggcggttaaatcgttgaggagactatggctaatcagtccaccaacgattagaattaagacttctgttagcggaacactgaaccagaccccggttaaaccgaatagactagcgagaatcaagacactactaattaagacgatataccctcgcataatggcgacaaagaacgatagtcgtggttgtgcgatggcggtcatgaagaggttattgacgatattgagactggagaaaaagaaactgataaagattagtggaatcccggctgaagcgtatttaaccaataattgattttgttcgtggttaaagagggcaataatcggttgtttgaagaggattaaaactaggtataagcaaactgcaatgccaaaggctgaagcgagaccgattcgcagactcgtccggacgttagcaaaatgccgtttaccaaactcacgactgacaatcggttgaacaccaactgcaacgccgttaaataaggataacccgacaatcaagatgttcgcgataatcccataagccgcgaccgcataattgccagctaaatgtaaaatcacgaggttaaacacaaagatgctgaccccagtactcatttcagttagaaatgacgggaagcccaaatgaatggcggtgaaggttggttttagatttaagtctaatttttttaaggttaataagcgttcaggatggtggcgatggcgcgttagaatcagcagactaaccaacggtgaacagattgtcgctaaagccgcacctagcatacccatgtgcaatggaaacatcaaaatgtaatcaaagacaatcacgaataggctttgggaaagcgtcgcaatcatcgtgagatgtggattactgtcatttcgaataaaacttaaaaccagattattgataatgaataaggggctaccaattagaataatccgcaaataagttagtgcaggggccatcgtttcatgattggcgcccagcaaatgtaacagtggtcggataaagattaagccactaatcataataattaggcctaatagaatagcgaaggttaagacttcggtaaaaatttgttgactcttttcaggatggcgaactttgttaatggagaaaatcgtcgcgcccccgatgccgagcattaaaccaaggccgttgaataaattgaagattggtaaatcaatgttcaatgcggctaaaccaatgggaccaaccgcaaaagcgatgaaataggtatcggctaggatatagattgataggccgagtgagctaaagacatctcgaacaatgtaacccgttaattcttttttgatactgggtgaacttgacattaaaacactcctattcaattggtagtggggttgcctgtaaacgtgcgatgaggtgctggattggcgtcggcagttctttacgggcaacaaggtagaactgacgttgatactgtttggaaagcggttgataagcaatttctggataatcaaggagtgcagcactagaaatgagtgattgaccaacaccttgtcgtaataattgtacgattattgcgttgcttttaatagtcatcgtttgcgttaatgttaaattattttctttcaagtagttcatcgtgtaatgataaaccccggaaccttcctcacgcaataaccaaggttggttaggttgtcccgctaaaacgagttggtcggattgcagtgtagtccgaattaaattcttttcagttaatggtttttcgataaaaccaaaatctaatttatgttgggtcagttgttcgacaatttgggaggaattaaaagtactaatttcgagtgcgaggccgcttaaatcggtttgatgacgttgcaatagtgcgggtagcaggtacataccggtggtgtgtgaagccgcaatacgacaaggaatcggttgatgggttagtggtgcttgcaaggcttgtaaatcttgttgccacagatccaataggtgttgtgcttgttggtagaataaatcagcgcttggtgttggactaatttgttggcgcccgttgcgttcaaaaagggtgacccctaaagttgcctcaagttgtttgatttgaaccgaaacagttggttgggataaaaataagagttgggcggcggtggtgaagtttttggtttcataaacggttttgaaaatttggagtgctttgaacatttaatcacttccattaattattttaataacaactattataaagatttattttattaattgaaagcttttcggtatagttaagttattgattaacagaggagtttgatgagatgaaaaaagtgttgcagaatttaccaggttttgggttgtcattggcgattgcaattatcagttatttaatcgctaaatggtggttaccgatgttgggcggcgcgacagttgcgttatttatcgggattattttaggtaatacttgcctcaaacaaccggtcttagcagctggtactcaattttccgaaaagaaattattggaatattccgtgttcttattgggcgcgacgatcacgtttcagagtattcaacaaatcggttggaacggggtgttattcaccgcaatccaaatgagctgcacgatcggttttgcgatttggtttggtaaaaggctgcaattcagcgaaggaacctatctattgatggccggaggtaacgcagtttgtggttcgtcagcgattggtgcaattgccccagtcgttgaagccgacaatgaggaaactggaattgcgatcacgatggtcaatttgatggggaccgttctgatgttaattttgccagtcatcggaacacttttatggcacggtaatgatcaattgcgcgggattttaatcggtggcaccgttcaatccgttggccaagttgtcgccagtgccacgatggtcaaccaatcaaccgttgtgacggcaactctatttaagattctacggattatttgtttagtttttgttgtcagtacgtttggttatttacatcagaaacaacaaacgaaagctagcgatgttaaattgagccaacaattattagcgaagaaaagtagtttagtgccttggtacgtcttaggattccttgcattttgtattttaaatagcttgcggttcttacccaatggctttggtgatttttgccacttcttgagtacttggtgtgaaacaaccgctttggcagcgattggcttgcgtttaaacttgaagaaattattcagccaaggtaaacaattgatggcttacgctggcggaattgttggtgtccaagttgtcttagcgattatcttaattaccgttttattctaaattgaaaaaaagcaacggcaccgcctattttaatgaggcgatgtcgctgcttttttagttattcgtgattgattaggcttgataagtgccaacttgtggcacactcttcaatgtcttgggcgtgtgatgtgaatttgcaaaaaagtcagttaaatcctgacccgcttttaaacctttatagtgtttgccaccggcccaaggaccgattgcggataagtcatagacgattccgtcaaccgcgacgtaggccggttgaccatcctgcccgttaaattgggcaagcgttttttgattaaaaatagtgtcgttcatcctaaaaacctcctgttggaaactgttgctattaatatagcgcttttataattaattaacaacaattaagttgtgtgcggagtaattgtttttttatgtttttatatccgctatctacggtactaaaaaagatttgccagttgttgccaacttaaaaatccgctatactacaagtcgaaagaaggttgtttaatgtcagaacaagatcgtttttatcaaccccaaaacgttaaagacgccatgcgtttcgttcaaaaattatttaatcaatataatcaagcaaatttaacggatgaattgattgcttatcaccaaaaactaaccctttatttaaccgatgacgtgttagccgaagtgcaaaaaagcgacaatccagaacaactcaaaaaattacaggtgatgattactgtcatgcaggactggctaaagattcgtttgagcggcaaaccatatgcgggtaaaatgcaacattttgaatacattgccgatcaagaacatacgagttttaaacatcggacgatcaagggcggcaagcgccccggtaatcttcggacatcccaccattaaaatttctcttgttattttatcaaaaagtgctaaactatttctgtaagcacttgggcctgtagctcagttgggagagcgcctgctccgcaagtaggaggtcgtcagttcgaatctgatcaggtccatcaccgttttcgaaaagccagcaaattaatttgctgacttttttatttgcagttcaattgtaaattcggcatactaacgataacgtattttagaggataagggtggcaaaataattgtttaaacgaaaaagcgattggtttttaatattagcgctcgtgatgatggctgttttattttacagttcatcgatgacgtatcatgaacaaacgtcggtaccgctgctagaacgatcattacacgcgcaaccgttaaaaagttggttgagtcaattctcatttcagtatgcgggtagtgaacaaagtatcaaagtcagtggttattttaaatttgtcgaattttttgtccgtaaaggggcccattttgggacttatttcctattaggtttgtttagctatctgggattgcgaccacggctgacgggtgccggtttagcggtgattttcagttggttagccacgaccggttatgcggccactgacgaattccaccaaatgttaaccggtgatcggacgccactatttcaagacgtcatgttagacagtgtcggcgcactgaccggtattgtgttatttctaatcatcgaacggttatggcgcttgaaaaaaagacgataaccttagtgtgattgcttttagcgtgtgaatttgctatcatagtattcgtctaaaagagtcaagtaattcaatctataaacgaaaaggggagttagatatgtcaggacattcaaaatggcataatattcaaggccgcaaaaatgcacaagatgcaaaacggggcaaaattttccaaaaattatctcgtgagcttttcatggccgcgagaagtggtggtcctgacccaagttctaacgcttcgttacgtttaattatggataaggcccgcgcagcaaacatgcctaaggataatattaaacgggcattggataaagctgaaggtagcgatggcgctcattacgatgaaattacttatgaaggttacgcaccaggtggcgtggctgtcttagttcacgcgttaactgataataaaaatcggaccagttctgaagttcgcattgcctttacccgcaatggtgggacgatgggcgcttctggttcagtcgcttacatgtttgaccgtcttggttacattgctattgcccgcgaaggcttagacgttgatgaagatcaaatgtttgatgatattcttgaagccggtgctgatgatttacaaacatcagaagatgtttttgaaatctacacagacgctaaagaattagccaaagtgcgtgatatcttagaaaagaaatatacattagcaaatgctgaattaacgatgattccacaaaatacgacacccgttgccgaagataaagtggaacaattcgaacatatgattgatgcgttagaagataatgatgatgttcaagatgtttatacggctggtgaactaccagacgctgaatagcgtattaatgaaagattaacggttaaattcgttaatctttttttgttgccgaaaattttgaagcgattgcgtaagtgaaggtaggagggaggcgtcaggatggcaattcaagatgaattacagacgttgttagttgattgttgtcagcaccgaacgcaagatttatattttcgaccaatcgcaactggctggcaattagcagaacgtcgcgcaacggggctggtgcaacgagaaccagtcaatcaagcggtcggtgaaaagttgattaatcggttgaaatatctggcggagatggatattagtgagaatcgacggccccaaactggtcgttccgaaatcacgattgatcaggaggtggtctatttaagattagcgacgattggcgattttttgaaccgggaaagtttagtgattcggtttatttatccgttattaacggcctatcggtgtgcgcaagttagccagttggcgcaattggaagcagtcgtgcaacaatcgggactggtgctctttgcgggcccgaccggttcggggaagaccactagtttgtattatttagcgagtcaggtgatgcaagagcggatggtcgtgacgattgaagatccgattgagattaaacaacctgaatttctacagttacaagtgaatcaggaggcgggattgagttatgcggcgctgttaaaaatcagtttacggctgcgaccagacacgttaatcattggcgagattcgcgatttagcgacggcccaacacgcggtgacggcagcgttaagcgggcatttagtattaagcacgattcatgcgcggaatgcccaaggggtcgtccaacgattaatcaacttaggcattgaaccagcccaattaacggcgtgtttaacgtgtgttgcttatcaatcgttagtgttgaattcacaagcgcaactggcggcacactatgatattttaatggccgctgatttggaggtagacgatgacctttaatcagcaccgtcaattagctaattttcaggccgagttattaacgatgttgggtcagttattacaaaatggtttttcgttaaaacaagcctttcaatttttaccggcggtcttcccgaaacagacaacccgcttaatgcaaattaatcagcaattagcggctggtagcgggttagcacaaagtttaaaagcagtcggatttgacgctgatgtgattgctcaaattgaattaaccgaattacaaggacacatggggctttgtttaagtcatctcggccagctacagaaaattcggcaaaagcgccggcaagaattattggggttattagcctatccgctttttttgttggtctttttattgaccctgattggcctattaaggggatacctgttgccggaaattaaagcattaggacaacagtcaaccggtattttgccgttaacctatttattaatcgtctgtctaatcctagtcgggattggtttgttagtaggggtggttctccacggctatcaacgacggttacccgttttagcgcaacttgaatggcgctttaaattgccatttatcgggccagtcatccaacaatattatcaatactatctggttttcgatttaggcacctgtttacaaaatggtttaacgttaactgaaatgggccaactgatgcaaaagttagcaactaagtcgtggttggcggcggtcgtccaacagttagaggctgacctcgcaacgggcaattcgctcgttgcgcatttaaccgcctctagtttttacccattagaattacgtttaatactagtcaagggaaacccaccggcacaattggctaaagaagttgaaatgttggcggatcttaaatatgccgtgttacaaaatcatttaaaacgccaattaagttggttacagccgatgctatttattctgattggcttgattattatttgcacctatctcagtattttattgccgctatatcaaacaatggaggggattgcatgatgcgtcgaaaaaaggcttttactctgatcgaaatggtgatcgtgttagcgatcatcgcgttattaattttgctgattgcgccaaatttaatgcaacaaaaaaatatggctgagaaaaaaaccgaccaggcgatggtcaccacaattcaaacccaagtcgaattagcgaaagaagacggaaaagggaatccgacgatggctgatttacagcgtcgggattttctatcgccagcacaagttaaacacgctaaagaacgggggattgagattaatgacggggtggttaagaaaaaataaggcgttcaccttaattgagagctgtgttgtcttagcgttgattgtcggattaacctggttcccaatgcaacgttatcaacggtttcaagcccaacaagctgaacggttgttttttcaagagttcgaaacgacttggcaatcaatgcgccaatatgttgcgaccgaaccggatagtgtggtgattacaatgtatccacaagggcggcggattgaatttagcgtcactcgtcagcaacagtataattgtcaaattgaaattccgaagactttaaaattaaccgttgagcaatggcaaggattgattttaaaacaagattatggggtcaatccgcggacgttgacgtttaaatcgacgattaatcaacgacgctatgattataaaattcaaatgatgtgggggatgctacacgtttaaacagcagaaagcctttattttagtcgaacacgtcgtggctttaacgcttttattgattaatagtttggtattgacggcttgtttacaacaatatcaacaaacgttacaacaacggcgcaatcaagcggacatccacgcggtgcttaaaatggcgacgactcagctggccgcgcaggatcaattgacgactgaatggcaatatcgttcacaaccatatcggtgtcgcaaaggcaccgattggattcggattcaacaagtaaagacgggtgagacaattgaaattcattggacaggtgactagaccggcgtttaccttaattgaaatggtgatttcgttggtggtattaatcctatgcacccaattattattagtgagcgttcgcttattgggtcagatgacaacgttagcgaatgcaaatcagcagaatattagttggcaaattgggatggtgcaactcgatcgatttttggaagaggcgtattttatgaagcataaaacggatgaaggtcaaaataaaatcatttttaaaaagcaggaaccagataatatttatcatttgaaacaggttaaacaggaactcgtcgttgtcagtcaggatgaggggtatatgccgttgattgctaacttaagacgcattcaatttagctatcacgaaccggtgttaagtctgcaaggcacttttaaagatgggacggtttatcaacatcgatgctacatggaacaatcccatgcgcaataaacgttccgggatggccctattgaatgcggtgctgttgttgagtgtgacggcggggctgttattgattgtcacgcgtagttatcaacaacaagcgctgacctatacgcggttaacgcgctattatcaagcgcagagtttggccaatttaacccaatcagcagcaaaaaaacggcacattaaaggcttaaaaacgacgcttgggaccactaaaattaattggaaaacgcgtcaaatcaccgtgcaattagacagtggttaccaaaaacagtttcgattgaggggtggaacagagtcgaaataaaaatactatttgataaagcgcttactatcgactatactacttaatataaccatctgtattacttgctttgccgttggattaccgctaaaatataacaggaatctaatgaatagaggtggctattttgcctaagagtgctgtagaaagtttgtttgatcaattggatcagacaacaacattaattgaacagaatttggaaacaacttatttggatgcactgactgaatccatcgccaacattgccgatggcggtcgggtcaaagtggttgacggcttacctgatcaacagacggtcagtcagttgaacgcattgtacgccgaaatcaaccttaagcaatatgatgcggaattgattcgtcaagcaatccaattggtcacactaaaagggttacgccaagtcaaggttgaacccaacaagcagatgacacctgatgcgattggctatctagtcgcttatctagctgaagttttcagtggcgggaccgcctttaagacaatcttggatccggttgccggaacggggaatttattaacgacggtcatgaatcatttgcaaagtatcaccaagcaagcgatgcgtgggtttgccgttgataacgacgacagtttgttggagattgctgggattagcagtgaattacaacagttggatacgacgttatttcatcaagacgcgattgaacctttgatgattgaacccgttggactagcagtcgctgatttaccaattggcttttatccaatcgatgagcgcgctcaggactttgaaacccgtgcgcaaaccggtcattcatatgcgcatcatttgttgatcgaacagacgatgcattatgtccaagacggtggttttggcttcttcttagtgccaaacgtgattttagaaaccgatgaggccaagcaattggtgaaatgggtgacgaaacacgtttatctgcaagggttattgagtctaccagctaacttgtttaaaactaaagaaggtcaaaaggccatcttaattttacaaaaaaagggtgctggcgcccaacaagcgaaacagattcttttaggtgagtttccaaattcaaatgatcaaaaggcttttgccgattatctacagaaaattcggacatggcatcaagaaaatttagtataactcatatagaaaaggtgattagatgtcaaaagtattagcaattaacgcaggtagctcaacactaaaatggcaattatttattatgccagaagaaacagtcgtcgctaaagggatggttgatcgtttagggttaaccgattctgtttttacagttaaatacggggatggtcaaaaattctcaatgactcaagatatcgaaacccaagatttggctgttgaattattgttacaaaagttaattgaattcaaaatcatcgcagactatgctgaaattagtgggattggtcatcgagtggttgctggtggcgaagatttcaaaacgtcagcagtcatcaacgaagactcactcaaacggattgaagaattatctgaatatgcgccattacacaatccttcagaagcccgcgtgattcgcgccttccggaagatattgccgaatgtaccgcaagtcgctgttttcgatacctcgttccatacaacgatgccagaagaaaattacctatacagcttgccactagaatactatcgcaagtatggtgcccgtaagtacggtgcacatgggacaagtcatcgttacgtgtcacaacgcgcagctgaaatggtcggcaaaccattgaaagacttgaagatgattacgatgcatttaggtagtggcgtttcaatgactgctatcaaagatggtaaatcgttagatacgtcgatgggcttcacaccactggctgggttgacgatgagtacccgttcaggtgatattgatgcgtcattagtggctttcttgatggcaaaattaaacatcaaggaccctgccgaaatgattgatattttaaataaaaaatcaggcatctacggtatttctggtttatcacccgatatgcgtgatctcgaacaaacgcgtgaagaacgccctgaatcacaattagcgattgatatttttgttaaccgtttaattaaatacgtgggttcatacgtggccatcatgggtggcttagacgtcctagtcattaccgctgggatgggcgaaggcgatatcttgatgcgtcaacggattggtgatcgtttaggttatttcggtgttcaagttgatccagaacgcaacaatgtgatggcgcaagaacggattatcagtacggatgattccaaagtcaaagtattgttagtgccaacgaacgaagaagtcatgattgccagagatgtggtcacattaggcaatctttaaaatatgaaaggtagcaaactgctacctttttttgatggaggcaacaatgagtaaatttgcaatattttatggtttattagcaattggattattaatcgtctggatttttgcgcaattccaaatggtctatcgcgctaaaagtaatcggttatggcaagcaatgatgacggtcgcagcgcttatcctatgtggggtaacggtagtcgtgattggtgatttaagtgataaggtgaccggtctagggtctgctttgattttattagtcctagcattctggccaaaagggttaacgaagaatagtgtcgtcgctaacgtcaatacgattcggcaatttgccgcaatttcaaaaattgaattaacaccagttgaatccgtggttgaattaaagtttttcgcaggtgagatgcaaatcgctaaattgaaatttaacgtggcgcaaaaaacgctggtcgcctttttacaagcgcgaatccctaagaagcgcttagtgattaataagggctaggtctttcatctaagcgggatttatgctaaaatatgctatgcatatatcgggggcgttacggattcgacatgtgtaggtgagcgtgagtcgcacttcgtaggttacgtctacgtaaaaacgttacagttaattataactgcaaacaataacaattcttacgctgtagctgcctaaacaccagcatagcgtgatccgcctgactttacctaagggttagatacgggtctcaaattaattaggttacgttaaacattgccgcttgaggtgtttaaaagagatttgcaagctagctggatcatactagccctgtcgaatggcgttttgattcagcgaaatcccaaatgatttggctatgagtgtagaagctggcgtggcaatgcgcatggacgcgggttcaacccccgccgcctccataaaaggttgtttttaaaacattttaaaatctgtttaatggcttcaaacgtcaccgtaacgacgtttggggtcatttttttgtggcttgaaaaggaagtgaataagcgggtgtcacacaaaaaacacacatttgattcaggtgattttaaggtgaaaaattgcataaaaaaactaatccgaaaaataatgggattagtttggataacgttattcagtggtgagtgacacaatattgcttgtttgataataggttgtgggttggtcgtctaaagtcagccaatcagcatccgctaacagtccggcgagactcgcaagcggattggtgtgggtttcggttgtaattgattcagaggtacccttaaaaatttcctccagataaaaagcttggtcctcaccgacgttaagataactggtatcgttcttccaagcgtgaatcgtatcggtggcttgaacgacgagggtttgattgttggcaaatattaatttgaatgacatagtagcgacctcctatagagtaatgattgaactaactttattatagcagtggttgttcaatcgggagcgtttaaagcctcatcaagttgttctttttgacagcggtatcagtgaagcctagaatggagttgttaaaaagggggcgttcggcatggcgaatgaagaacgactggatagtttaacgactgaaattgaaagtaccgttaagaaagtcgcaagtgactttaaacgggtcaccaaacaagctcaatcaaagactaaggcctaatgaaggctcaacgtatcatctagcaaattttggatgatgcgtttttaattttagcaaatcaattcgcttttaaagaacaggcttggtataatttaaaggacagttagaggaagtaggtacaataatggattacgcagaaatggtagatcggcaaaaacacattcgtaatttttcgattatcgcccatattgatcacggtaaatcaacattggctgatcgaatcttagaaatgacggatacaattgccaagcgcgatatgcaagcccaaatcttagatgatatggaacttgaacgcgaacgggggattacaattaaattaaatgcggtcgaattgcattatcatgcgaaagacggcgaaacttatattttccatcttatcgatacacccgggcacgtcgatttctcctatgaagtttcgcggagtttagcggcctgtgaaggggcactcttagtcgttgacgcggcgcaaggggtcgaagctcaaacgttagccaacgtttatttagccatcgatgatgatttagaaattgtgccagttatcaataaaattgatttgccatctgcgcaaccagaggtcgttaaagctgaaattgaagaaatgattgggttagatgcttccgaagccgttttagccagtgctaaaagcgggattgggattgcagaaattctagaaaaaatcgtggcggacgtgccggccccaactggtgatttaaaggcgcccttaaaagccttaatctttgattcagtttacgatagttaccgcggggtcgttttaaacgtccgcgtctttgaaggcacggttaaaccgggtgatcggattcgtttaatgaatagcgaaaaagaatttgaagtgactgaagtcggtgtgatgtcaccgaaagccgttaaacgtgattttttgatggtcggcgatgttggttatattaccgctagcattaaaacgattcaagatacgcgggttggtgataccgtgacttcagcggataatcctgctgaagaggcgttgaaaggttatcgccatattcaaccgatggtgtattcagggatgtatcccgtcgataacgcgaaatttaacgatttacgtgaagccttagaaaagctccaactgaatgatgcggctttagaatttgaaccggaatcatcccaagcgttagggtttggtttccgttgtggtttcttaggccttttgcacatggatgtcgttcaagaacgattggaacgtgaatttaatttagacttgattatgacggcgccgtccgttgattatcacgttaatttaaccgatggcaccgaagtggttgttgataatccatcagaaatgccagaaccttctaacattagtgagcttaaagaaccgtacgttaaagcgtcaatcatggtgccgaatgaatatgttgggtcggtcatggaattagcgcaacgtaaacggggcgaatttgtcacgatggattatttagatacttatcgggtcaacgtgatttataatatgccgttgtccgaaattatctttgatttcttcgatgatttgaaatcgaatactaaaggttacgcatcattcgattatgatgtgactggttatcgcgcgagtgaattggtcaaaatggatattttattgaatggtgaatcggttgatgcgttgagtttcatcgttcatcgtgattttgcttttgaacgcggcaaggcgattgttggtaagttgaaagaaacgatcccgcgtcaacaatttgaagtaccgattcaagcagccattggcaataaagtcatcgcacgatcaaccgttaaagctttccggaaaaacgtgttggctaaatgttatggtggcgatatttcgcggaaacgtaaattacttgagaaacaaaaagccggtaagaaacggatgaaatccgtgggttctgtggaagtgccgcaggaagccttcatgtccattttgaagatgaatgatgaagataagaccggtaaataaggattcttaaaaataaaataatcacaaagtagtcgttttgccgaccatttgcctacgcgattttgagtaggtcggcaaatcggctatttttttcttaaaaaagccccgattgaagcgctttacatggtatatttaaagtaccaaaaggagggtttaccatgattatgaattatcaacatattttagtgggaatcgacggttctaaagcggcagatcgcgcattcgaacgcgcaatcgcagtggcgaagggcaaccaggcaacgcttgatattgctcaaattattcctgatggtgattttgcagtttcagcagttggtttatcagctaatttaatcgcacatgaaaaaacaattattcaagccaaattggctgaaaaagtcgaatacgcgcagcaacaaggcgtacggaatgttaactcaattctgaaattttcaacaccacgtcaagaattaacgaagacgattcccgaagcacgaaacactgatttaatcattttagggaccagtggacaaggtgccattgatcgttttgtcctaggctcagtggcacaatacgcgagcacgcacgccaagattgatgttttattggtgcgataaaagtcagctgtgacagaactcggttatcaattgagtatcaagttaaaaatgcggtctatccagaactaaggatagaccgcattttaaatttgaacggaaattgatgagttatggcgcgcgttaaagtaaatattcgtttgactatgggattactgagactaatatggtagctacttttttgctatttacaattagtctgtataacgaacagcagtgccatacgccgcaactgattgcatatctgtgccgattgaaccggaatcgaaacgcatcatgacaaccgcgtcagcacccatttcagctgcatttttacggaggcggctaatcgcaacgtcgcgtgattcagtcatcatttcggtataagcaccgatttcgccaccaacgacgttttttaatgaagcaccgatatttttaaagacgtttttagattgggtcgttaaaccgaagacttcgcccaaaacttcgtagtttttaccagggatcttttcggtagttgtgattaagatttgctctgtcatattaaacactccttcggaatcgttaatttacttgctaatgatagcgtagcagatatgctaaaggtggtcaattaaattgctatcaatcgatgacttttaaagccttttgagggacatctttttgaggaacagcttcgtaaccattttctgctttggcacgggtgtagctgattttgagataagcattgcgtttgagtggcgtattgtcttctttgacgctagtgaagtttaattgcttcgtctgaccatcttgatcagccccttgcaattggtagcgataactgacgaatttggtgccatcatctccctggccgtcttcacgttgtccgttagttgtcacctttacataataatagtgaggactgtagcggtattgatagatgcctcctaaacccaataggattagaattgcgagtgcgatgattaatattttcttggccattgaaggcacctcctaagttgataagtttattatgccggaaaattagtttgtgcaccatttatttggctaacagtcagctaacaaatttgttaggtcgttaaaccaatttagaatgcaaaataaaaacagtcaaaatactgatcaacgatcaagtgattgtgactgctaaggatggtttatttaaaaaatagaatcaatagtaacgtgattagtgcaggtaagcattgtaggaagaaaattttcttagtggcggtgaaagtcccatataatgcgacaatcacaatgtataacatcaatagcgataagacggtcattagtgtttgaccgctgaatagcaggtttgccataagaatggtgacgcctaacatgccgttatagataccttgattccccaaagcgactttagcgttgggcaagccgacaaaattaagtggcatgtcaaaagcattagctttagtttggtcactggcaaacatttcgatgcccataatgccaagatgttcgatggcgattagacaggttaaaataacaattaataaatgcatggatgctcctccttgaaataactttttcagtataccagaattgtcaaaaaaagccttggctaacgtttgcttagccagggcttagtgagtgtttaacgatctgcataacctgctggatggcttaaatgccagttccaagcagtttcgataatcgcttcaatattgtcatattttggttgccaacctaatgtaccacgggctttgtcgctagcggcaatcaaggtgctaggatcgccagcgcggcggggtgcgatctgagttggaatcgctttgccagttactttacgggcggctttcacgatttccatgtttgaaaaaccagttgatgagcctaagttgaaggcgttactaccgttaccggctgccaaatatttgaaggcgagaatgtgcgcatcggccaaatccaatacgtgaacgtaatcgcggacgttggtgccatctggtgtctcgtaatcgtcgccgaagattgagagttcggcgcgatcgccagcagcgacttgtaagacgatgggtaataaatgggtttcaggatggtgatcttcaccaattgaaccgtccgctttagcgccggcgacgttgaagtaacggagcgcgacgaacttgatgccgtaagctttgtcggcccaacgcatcatcgtttccatcatcaacttgctttcgccgtaaggattggtggggatttgtggatcagtttccttgattggaattgatctgggttcgccataagtggccgccgttgatgagaagacaatcttcttaacatcgaattccgtcatgacttcgagcagagcggtcatgccataagtattgttgtcgaaatatttaagtggtgctttcatggattctgggacgattgagaaggccgcgaaatgaatcacgccttcgacgtcttcttggtcgaagacggtccgcataaaatctttatcgcgaatatcgccttcgtagaaacgggcttgggtgttgaccgcagcgcgatggccagtgattaagctatcgacaacggccacatcgaagccttggttaactaattggtcgacggtgtgtgaaccgatataaccggccccacctaaaactaaaattgacattaaataatatcctcctagagaatggcttattgattcttaattagtatagcatttcgacgaataaaccaaaactagcgaaatgatttgcaacttaaaattaagaactttgctataatagaacagttaatgatttgaaaatgcgagggattaatgtggaagcccaatataaatggcaattaaaaacaaaaccaactgaagcagaattaaaaacagtcacggcatttgatgcaatgcccccagcaatcgctgaattattatggcagcggggcttacgcgatgatgatgcggtgaccaattttatgcaacctaacagtcaacaattacacgatccattcctattaaacgatatgcaaaaagcggttgaacggattcaatccgccgttgaagctggcgaaaaaataacggtttacggtgattacgatgctgatgggattaccagtacaactttgatgcgcgagacgttagaaatattaggcgccgacgtcaacgtttacgtgcctaatcggtttaccgacggctatgggccgaatttagcggcgtatcaacggattattgctgatggcacgcaactgattgtgaccgttgataacggggtcagtggtctagaaccgattgcttatgcgcaagaacacggtgttgacgttgtagtcactgatcatcatgaattgccagccgaactaccgaaggcgacggcgattgtgcatccccgttatccaggaagtgactatccgtttggcgatttatgtggtgtcggagttgcgtttaaagtcgcgacggccttattggatgagattccgtatgagagcttagacttagttgcgattgggacgatttgtgatctagtctcactaactgatgaaaatcgggcgctggtcagcttagggttacaacaattgcaaaatacgagtcgcccaggcttagtcgcattgtgtcaagctgctggcgtcgaacaagccacgattgatgccacttcgattggtttcggcatcggtccgcggttaaatgcgattggccggctcggtgatgcgactctaggggttaatttattaacgacttttgatgaagaacaagcggtcgaacaggctaagtttgtcgaaagtcaaaataaagaacgccaaggtttagttcaagaaattacgacggctgctatggcgatggctgaaacaccggaaaatcaagcccatcaaacgctagtattggcccatacgggttggcacgaaggcgtcttgggaatcgtggcaagccacgtcgttgaacaaacgggcaaaccgactttagtgttaaacattgatgaagcaactgggttggctaaaggttctgggcgtagcgtcgaagcgtatcacctgtttaaggcgttagacgccaatcgagacctattaacccattttgggggtcatcatatggcagtcggcttaacggttgctgtggaccagattgaagcgattcagacggcaatggatgcttatgcgactgaacaacaccttgatttaactgctaaacaaccattagcgattgatttagcgctcagtttagcggaaattacctctgatttatatcagacgttacaacaattggcgccgtttgggacggataatccagaaccgttgattgaattggaaatccctcaattagctgatctaaaacaaattggggcggatcaaaaacatctgaaatttaccgccgtcgaacaacaacaaaaactaccaatcttggcgtttaaccgtggggcgttactgccggcactacaagcggttgaagccattgaaatagtcgggacgttgagtgaaaatacttggcggaatcaaaccactttacagatgatgttgaaagatttgaaaaccagtggtcaaattttgttggatcaacgcagtaatcatctgacccaacaattgtttaagaacacaggggcgtatgtcttttttaaccctaaactattggcgcaattacaaacgtatttgcctgctggcagtcaagcaatattagcgaccgatgcagaagttgcaacggcaactaacatcacagtcgttgatgaaccaaccgatttaaccgaatttacgactttctatcaacaacaatcggccactcagttagcttttatctgttacgcgaaacattcggcctatttagatggtattccgaataaacaacaatttgcaacgttcttagtttacttacggcaacacccaggtatcgagaaagcccggttaggcgaactagcaacttatttaaaaatgcaattaccattaatgattttcatgttagaggtgttttttgacctcggatttgttagaatagaacgtggtctgatttcggccgaaccacagccagaaaagcatgcactcgaaagtgcaccaagttaccaacaacgattagctaaaattgaaatggagaaacagctcgtttactcaactttttctgagctgaagaactggttaaaaacaatttcgtgattagccgatcgctattagatttaaggagcgaattataaatgtcaattaactttaaagactatgtcgcaagtgtccctgactttccagaagtcggcgtcactttccgagacatctcaccattgatgtcagacggggaagcctatgcggcagcaactgacgaaatcgtggcatacgctaaagatcgtggcgttgaaatgattgtgggcccagaagcccgtggattcattgtcggttgtccagtggcttacaaattaggggtcggttttgcacctgctcgtaaaaaaggtaaattaccacgaccaactgtttcagcaagttatggtttagaatacggtcaatcaacgctatacatgcacaaagatgcggtcaaaccgggtcaaagagttttagtcaccgatgatttattagcaaccggcggcacaatcgccgcaacgattaagatggtcgaagaactaggcggcatcgtcgtcggcacagccttcttaatcgaactaaacgacttaaacggccgtgaaaagattaaagattacgatattttcaaactaatggattattaagaagtgctgactaagccggttaacttctgagtatagcctaaaagcggacgttgtgacggggttagtcatgacgcccgctttgtagctagacggaagaagttggcttagaagcacgttaccaagaagtgctgtgagttgcggtcagcaactgagcactaacagaataataccgattatctttggtttttaagataattggtattattaggttaagcggaagttgttgcaactcaaaagcacgttactaagaagtgcgactcaatttggtcagactttgaggattaatctaaaactgggtattatgagtgctttttactcatgatacccagtttgtagttaaccggaaaaggctaattgagagagcacgttatcaaagaagtgccgtcaaatcacagtaaaaaggccctctcatccacatatcggatgggagggccttttaagattcagttaaattcgatctctatagagtccgacgactttacctaaaatactaacttcgtttaaaataatcggttcaaacgtgtcgttttcgggttggagccggtaatgattggcttctttgaagaagcgtttgcaggtcgcttcgtcttcggcggtcatcgcaatcacgatgtcaccgttatcggcgttggcctgtttacgaatgatgacttcatcaccgtctaaaataccggcgttaatcatactttcgccccgaatcgttaacatgaacaaatcttgttcggtttgcaaacttggggggatggggaaatagtcggtggcttcttcaacggctaaaatgggcacaccggcagtgacgacgcctaaaacgggaatctttttaggcgtggcgccaattgcacttaaacccgcagcggttaattcaatggcgcggggtttcgttggatctttttgaagtaagcctttcttctctaaacgtgctaagtgaccatgaacggtggacgtggaagagagattaacggcttcgcaaatttcgcggaccgttggcggataacctttgtcttgaacccgatcatggatgaaacgcaacacttctaattgtttggattcagttctagtcataaaagcacctcattcattctgttaatgatatggtagcatatctatagcgctatttcaaacaagtgttcgtgttttttgactttttacacataataggtcaaaatagagaaatagattttaatggaggcaattaaaatggtaatgaatcaagaacgattggatcggatcaatgagctggcccataaagctaaagctgaagggttaagtgaagctgaaacggcggaacggcaaacattacgcgatgcttacatcaaggatttccgggctagtttccgttcacaagttgaaatgttacaggtctacgataaggaaggccaagaagtcacgccggagaaagttaaaaatattcaacgtgaaaaagggttacgtgacaattaaactgagaattccgctttctttttgccggaattatgtgtaaactatttaagtgaactgaaagaaaaggggtgcataagatatgggtatgggattaggtattttaatttttgtcattggcgcgcttttaggggctgtagcaggtttctttggtgcacgtgcttacatgaaaaagtatttccaagacaatccaccagttaacgaagagatgttgaaagctatgatgatgcagatgggtcaaaaaccatcagaaaagaaattgaatcagatgatgaattcaatgaaggctcaacaaaaacgtagcaacgataaataatcaacgttgaaacatcgctaatggcgatgtttttttgttctaaaaaacagatgattgtccccgttaagtaagattgctataataggggatatcgaattttcacaggaggtgcactatgggcatatttaaaaagcttagttggtattttaagcaagaagcacgccgctattttttaggggtggtcttcttaatcttagtggcaattgttcaggtgattccaccaaaagtgattgggaacttggtcgatttaatggccgctcaaaaattaaccgctaaaacgttgttgatttggttggtggtgttatttgccgctgcgattttacaatacgtctttcgctatggttggcgcacccgaatttggggcggggccgccaagttggaacgaatcttacgcagtcgattatttaaccattttatgcagatggatacgccgttcttccagaaacatcgaacgggtgatttgatggcgcacgctaccaacgatttaactgcgattcaacaagtggccggtgccgggattctaacgtttgcggattcaattatcaccggtgggacgacgattattgcgatgatgctcttcgtcgattggcgtttaaccttagtggcgttaatccccatgccgttattggccgttgcttcacgcaagttaggggcgcacttacacatggcgtttggtaaatcgcaagccgctttttcgcgtctgaatgataaaacgcaagaaagtgtttccggtattaaagtcatcaagacgtttggtcaagaaacggctgatacggctgattttgaccgcctagtcgacaagaccgtggcgattaataaaaaagtcaatttcgtcgatgccttattcgatcccgtgattagtttgattatcggggcgacctacgttattacgattatctacggtggctatctggttagtcacaagatgattacaatcgggcaattgattgctttcatcagttatattgctgctttagtttggccgatgtttgcgattggtcgcttattcaacgttttggaacggggcaatgccagttacgatcgggttgatcaattgttacgagaaaccagtacgattatcgagaaaccaaacgcgattcaaacattggcgacgggtgatttgcaatatgatgtgacccgttttaaatatccagatgatgcaaaagtgattttaaccgatattcatttcaacctaccgcaagggcagacgttagggattgttggtaaagtcggggcgggtaaaagtacgatcattaaactacttttacgcgaatatgatcggtacaaaggccagattcaaattggtggccatgatattcaagattacgcactagatgcgttattggacagtatcggttacgtcccgcaagacaacttcttattttctaccgacgttcgcgacaacattcgttttgcggattttgaacaggatcaagcgcagattgaaaaagtcgccaatcaaagtgccgttcacgatgatattttaacctttgcacagggttacgatacgattgttggtgaacggggtgtctccttatcgggtggtcagaaacaacggattgcgattgcgcgggcgattatgaccaaccctgaaattttaattttagatgattcgttatcggccgtggatgctaagacggaagaaacgattttgacgaatctcaagacaatgcgggcgcaccaaacgacgattattaccgctaatcgattgagcagtgtgatgcacgccgatgaaattattgtgattgatgaaggtacgattatcgaacgcgggcaacacactgaattattggcacaagccggttggtacgcgcaaatgtggcagaaacaacaattgaatcaagcgatgggaggcgattagatggttcaaaaatatcaatcagaatggtcaaaaaccattacgactaaggaacaattgacgattatgcggcgtctttttcgctataccaaacattataaaaaacagtttattggtgcgattattgcggcggcctttttagccatcatcaatattttattaccccgcttgttacaagtttttatggatcgttatttaacaaatggtaatgcaaccctgaacattttgctagcggtggctggtttatacattctcggggtggttatcaaagcgattagccaattctttcaagcttttctattttcaatgggttcggaacgggcgatggaagatgtccgccggtcgctatttcaacaattacaccggttaggcatgcgttattttgatcagacgcccgccggttcaattgtatcgcgggtgaccaatgatacgatgacgttaattgattattggaacgtcttcttatcgttattagtcggggcgttttcgattatctcggcttttatcgcgatgtggttattatcaccgcaaattgcgttagcgaccgccgcttttttaccgattctactcatcattatttggtattatagtcgctacagcgcacgggtttaccgccatatgcgtgaaaagttgagtcaattaaatacgaagttaaatgaatcaatcgaaggcattacgattattcaacaattccgccaagaaaaacggttgacggctgaatttgaaacggtcaacgcggattatttaaaaacccgtgaagcgatgattcggattaactcgttgttgttagcgccagtcgttaatctattgtatacattggcgttagtggtcgtgttaagtctgtttgggttagatgcgttgcacagcttcgtggcggccggtacggtttatgcattcaccacgtatgtcagcaatttctttaatccgatgaccaacatgatggattctttgtcagcacttcaagacgggatggtcgcggggagtcggatttttagaatcctagaccaaaccgaatttgtgccgcaacaaaatccagacgctaatcgtgaaatcacggctggcaaagttgagtttaaacacgtctcgttttcttacgatggcgaacatgaaattctgcacgatatttcgtttgttgcacagccgggtcaaacggtcgcgttagtgggccataccggttcaggtaagagctcgattatcaacgtcatgatgcgcttttatgaattctatgagggccaaattttgattgatgggcacgacattcgggattatccgatggctgaattacgtcagaagatgggtttggttttacaagatgccttcatgttttacggcgatattgcgtctaatattcgcctgtttgatcaatcgattaccgatgctcagattcaagacgcggccgagttcgtgcaggcggatcaatttatcgaacaactccctggtcagtatcacgccaaggtgattgaaggtggtagtcagttttcaagtggtcaacgacaactcttgtcgtttgcccggacgattgtcacgaaccccaagatattagtgttggacgaagcaactgccaatattgatactgaaacggaagaagcgattcaaaccggcctgaaacggttacggcaaggccggacgagtatcgcaatcgcgcatcggttgtcaacgattaaggatgccgatttaattttagtcttagaccaaggtcgcattgttgaagcggggcaacacgccacgttaattgcagatcaaggccggtattacgaaatgtatcaattacaaaatggtgacgcataacttcggaggaatttaagcatgaaaaagaaacattgggtaaaatggaccttaattagtttagtggcattgattgtgattggggtcgcgggcgcaacaacgtatatgtatcattacgcatttgtacccggcgacaaagcgttcctgcatggtggtaaaaaatcgcaagattatattgataatcaagcgtggcttaaaaacgtcaaacaagccaaatggcaacagacatcggcaacggacaatattaagttagtcgcactttatgtaccagcggccaaagccactaaaaaaacaatcattgtcgcgcatggttatatgggtaaaaaagaagatatggcccgctatatccatatgtaccatgacttaggctacaacgttttagcgccggatgatcggggctctggccattcaggtggcggttatatcggttatggttggccggaccgcttggattacgttaagtgggcgaaaaaagtcgttaaaactgatggtcaagacagtcaaatcgccctctttggggtcagtatgggtggcgcgaccgtcatgtatacggctggcgaaaagttgccgagtcaagtcaaagccgtggttgaagattgtggttatagcagtatttcaggcgaactagaatatcaattaaatgatttattcgggttacctaagtttccgttattctacacgaccaacctaatggcgcgggcacgagctggctataatttctacgaaggcgatgccactaagagcctggctaaatcgaaactaccgattttcattattcacggtggcgccgataagtttgtgccgactaagatggcgtacgaaaattataaagcggccaatcaaccaaagcagttatggattgtccctaaggctgggcatggtgcagctttagaaaaacaaccgacacaatatcaacaaaaagtatcggcgttcttaaatcagtattgggattaaaataaaaagcggtcatcagctgaatttagctggtggccgctttttaatggggactatttcttaggtttctcaacaatttcgtatttaaaatcaggattaatttcttgatccaactgatcgaaagcatcttgcatttgttgtccaactagggctatgttttcatcgtttaatttcaatttaggcgcgaccggaatcggttcaccaaaacgaatcgtaatcttctgacgtttcaataaatctttgaaggttaaggggccttgataaacagcggggacgagtggcacgcgcgccatttttgcaatgacgattgcgccaccttttaattcgctggcgtaacggctaccggttggaaacataatcaatgacaggtctttggaacggagtgctttaactggtgttttaatcgctgaggggcccggattttgacggttaacgggaaaagcattggcgtgatttaaaataaagcgaattacggggtttttaaacaattcttctttagccatgaacgtaaatttacgtgggctagcggcgagtgcaaagaaaattggatcccaccaagttcggtgcggtcccactaaaacgtaggtaccttcaggtaatgcttctttattttcgacgtttggtttgccgtttaacaaccaagcgagaatgcggacgataaaacgggcaaaagagaaaaacataaatttttaattcctttcaaatcagacttctttttttctcattataccaaataacgctttcctttgttataatatgggctaaatataattggggttgacggataatgttaaaaacaggggaacgaattgatcagttgcatcgcttagagattcaaattattcaaagtccggccgtcttttcattttcgatggacgccgttttattagctgactttgcgcgtttacccaagcaaggccagattgttgacttgtgtgcgggcaatggcgcggttggcttatttatgagtcataagaccaacgggacgattactggtgttgagctgcaaccacgtctagccgatatggcacaacggtcgattgaattgaatcagttagaaaaacagttaaaaatagtgacgatggatttaaaagacgtcagtaccgtgattgccaaggatagcgtcgatgtggtgacgtgcaatccaccgtattttaaggtaacaccggaaagtcagaaaaatccgaatcagcatctggcgttggcgcgccacgaaattgcgacggatcttaagacggtggttcaaacgatgagtggcttgttaaaaatgaatggccgcgcttatttagtgcatcgaccggatcggttcttagaaatttgtgatgaattacgggcggcacgtttagaaccgaaaaaagtgcaatttatctatccgaaagcgggcaaagaagccagcatggttttaatcgaagcggttaaagatggtcgaccaggcggtttgcgcttgctgccggaattgacgatttatgaccaaaatagtgaatacacaccagaaatgcgaaagaagttatttatggatgactgaagaagcggatcaacaatattatttttacgttttagtttgtagcgaccacagcttctatgggggctttacgacggacgtgactaaaagagtcgccacccataatacgggtaagggggctaagtacactaaattgcgccgaccggttcgtctactttattatgaaacgtttgcggataaatcggcagcgctcaaagccgaatacgcgtttaagcaccaaagccgtttgaaaaaagaacgttatctagaagcacacgggattgcatcgacccaattttaaaaacaaatgtaaagagggaatgatcatgaagcaacaagtaatgataaggccagtcaagctaacggatgctgaggcactataccaactggttgaccgcaatcgagccaatctaagaatttggctaccatgggtggatgcgatgcattcggcgcaagatgaattgaattttttggactactctgtgcagaaaatggccaacggtggcttatggatgatgactattttagtcgatcaacaagtcgttgggatgattgatattcataatttggaaccgactgaacaatcgggtgaaatcggctattggttaaccgctaatcaacggggacaaggtgtgatgggctcaagcgctgcaacaacttgaacaactagctagtcagcaattaggtctgtcgcaattaagaattattactgcgatgaccaacgaggatagtcaggcggtggctaaacgtgctggctatcagcaaatagctgattttgaggggcaagtgacggtcgcaaatgttgtccaaaccggtctgttgtacgttaaaaaattagcgaaaatcactactaaataggccttgaaaagaggcttgacgtgggctgaaatatttagtatacttttaaacggtatttcaataccaaaaaaataattcacactggtcgatttctagagaggtgctcagcaatgagttctctaaaaaagtgaaatcagtggtcgaataaaaccatatggaggtctgttgacatggctgtattgtcaatgaaacaattattagaagcgggtgttcacttcggtcaccaaacacgtcgttggaacccaaaaatgaagaagtttatctttactgaaagaaatggtatctacatcatcgatttacaaaaaaccgttcgcatggttgatgatgcttatgatttcgttaaagaagaagctgctaacgaaggtgtattcttattcgttggtactaagaaacaagcacaagatgcaattgctgaagaatcagtacgtgctggtcaatatttcgttaaccatcgttggttaggtgggactttgactaactgggatacaatccaaacacgtatcaaacgtcttaaagaaatcaaagcaatgggcgaagatggtactttcgaacgtttacctaagaaagaagttgccttgttgaagaaacaacaagataaacttgaaaaattcttaggcggtatcgaagacatgcctcgcatcccagatgttatgtttgttgttgatcctcgtaaagaacgtattgctatcaaggaagctcaaaaattaaatattcctgttgttgctatggttgatactaactcagatccagatgatattgatgttattatcccatctaacgatgacgcaatccgcgctgtacgtttgatcacagctaaaatggctgatgccatcatcgaaggccgtcaaggtgaagatgatgttgaagaagcaacattcgttgctgaaaacaaatcagctgactcaatggaagaaattgttgaagccgttgaaggtaacaacgatactaacactgacgctaaataaggattcaaataaagctgtcttagaggttgcgcaaatactgcagactttgtgaggcagctttttttaaacaagaaacgcactctataaattataaattgtcggaggtacatcaacatggctgaaattaaagctgctcaagtaatggaattacgtaagaaaacaggcgttgggatcatggacgctaagaaagccctagttgcaagtgatggcgacgttgctttagcaatcgacgcattacgtgaaaaaggcatggccaaagcggctaagaagagcgaccggattgctgccgaaggtttggctggcgttgccgttaatggtaacactgctgcagttgttgaagtgaattcagaaactgactttgttgcttcaaacgatcaattcaaagctttattaaatgagattgctgaaacaatcgctaaaaacaaaccagctgatatggctgctgctaatgaactaccaatgggcgaaggcacaattgctagctcagttgttggtttaacagccgttatcggtgaaaaaatcagcttccgtcgtttcgaattagttgaaaaagcggatggcgatcactttggttcatacctacacaatggtggccaaattgcgtcattagtaacccttgaaggtgctgatgatgaagctgctcatgatatcgcaatgcacgtttcagcggttaaccctgaatacgtttctcgcgaagatgtacctgctgaacaattagctcatgaacgtgaagttttaactgaagaaactaagaacgaaggcaagccagaaaaaatcattcctaagattgttgaaggccgtgttaacaagttcttgtcagaaatcagcttgaacgaccaagcatttgttaaagattcagaccaaactgttgctcaatttgtcgcatcaaaaggtggcaaagttaagagcttcgttcgtttcactgttggtgaagggatcgaaaagaaagaaaataactttattgatgaagttatgggtcaaatcaaataattatttgagtgtccgaaaaaaaggaacgcaatttgcgctccttttttttcggactattatcagaattcacgatggcgaccctatttcattccggaatatggtaaaataagcctagtaatcaacgaagggatgtcaatcatgtcaaatacaaaatataaacggattgttttaaaggttagtggtgaagcattagctggcgaaaaaggatttggaattgatccagaaatcgttaaaacagtcgcagctgaaattaaatcagttcatgaattaggtgttcaaatcgcaatcgtttgtggtggcggtaatatgtggcgcggtgtcactggcgaacaaatgggtatggaacgtgcgcaagccgattacatgggcatgctctcaacagtcatgaatgctttggcattacaagatatcttagaaggcatcggtgtcccaacacgcgttcaaacctcaatcgaaatgcgtcaaatcgctgaaccttatattcgtcggaaggctgttcgtcatttagaaaaaggccgcgtggtcatctttgctggtggcacgggtaatccttatttctcaactgacaccacttctgcattacgggctgctgaaatcaacgctgacgtcatcttgatggccaagaacaacgttgacggtgtttattcggctgatcctaacacggaccctacagccgttaagtatgacacattaacgcatttagacatcatcaacaaaggcttaaatgtcatggattcaactgcaagtacattatcaatggataacgatattccattggttgtcttcaatttaaatgaacctaacaatattaaacgcgttgttgaaggcgaaaatattgggacaacgatcaaagggggaaaataattttggcaaataaaagtttagaaaaagcacaaagcagcatggaaaaagctgaagcagcattacaacggacattgggccaaattcgtgccggtcgcgcgaatgctagtctagtcaaccgtgtgatggttgactattatggtgcaccaacacctttaaaccaaattgctgcaatctcagtcccagaaccacgggtcttgatgattacaccttacgataaaggcgctttggaagacgtcgaaaaggccctttacacggctgatatcggaatttcacccgctaatgatggcacggtaattcgtttagtgattccacaattgactggtgaacgccggaaagaaatcgctaaagaagttggtaaagaagcagaaacggctaaaattgccgttcgtaacgcgcgtcgcgacgcaatggatgatttgaaaaaatcagaaaaagccagcgaaattagcgaagacgaaatgcacgacttggaagaacaagtccaaaaattaaccaacgaagccacaaaacgcatcgatgaaatttcaaaagacaaagaaaaagaaattacagaaggttaaagagtgctgactcaagttgtttaggctttgaggattaacctaaaaacaggaattatgagcgttttttgctcatggttcctgttttgtagttaaccggaaaagactacttgagaagcacgttttggtaagagtgctgtgagttgcgtttagcaactgagcattaattagaaatacccttttaaccagattttaggttaaaagggtattttagattaagcggaagttgttgcaactcagaagcacgttttgaccagattgctgtgagcattagcacgtttaagctaagtgcctgactcaagcgtttaaaccttgagcatcacctaaaaatgagcgccatgatttgaattataatcatggcgctcattttttattagttcgagtatctggtgagatggtttgagaaatatttcaaaattaaacggtaactataaagttgaagcgctcgcattaatagtgtatagttcatttttaagtgagtgttagtcgaaattaattagtcaataaaagccattcataaatggcgccaccatagtgtttagtgatactatggtggcttttaaatttgaggaccattgggggtatgtgtgtgatcaattttaataaaaaatcatttggttgttttttgctaatagccattatcttagttgagattttattggtgctcgatattcatagcgactttcctaactttatgatacctaagaaaacgagcgccttaaattatttttatttttcgcagtctggtttttcgaaaacaatgttggttgtttattgtattgcaccatttatctatgcctatcattacgtggaggctaaaaataatggcttccaaaatatgatgattacgcgattgaactcgcaaaggcgttactttaatcgaatgctattaactaatgctgtgtacgtcgcggttacgttttgtgttttaaaatcagtacaactagtgacctgtattattgtgattaatcccctggatttcaaagatgccattgctctgaaagccaaagcaccttacgttttgtcgaccaatccgtttataaacttattattattttttgttctagcaattttaggtgaaattattttttcgctgttagtcataatggttgggttgtatattgaaaatacagttttatttctaggtagtgggttaatgctgagtttgctaggggttttaataccagcgctcgcaaacaatgcgttaaatttgaaatcgtcgatattgatgaattcactatcaatatcgaccttaatttcgccgggtatatcgacgttaggtgcgtacgcacctaactatggggcgctggcttcgtacggattatcggttgctttttatatgatactgacaatcggactctattttgtttggcacttgagatttaaggaagcataacggggggctttatgttgagaatgacagctggccgcaactggcgactatggttaatcgtaattatttgtagtatctcaaatctgctagttcttgggcatttcgatgttgacgtttacggggctttggcgcagtcaaattttattacaacggtgccgaatgttattatgttgctagtagtttatcgttatctttatttaaatcatcgaatgaaactattcctgattccgcgaattggattgcagcagtatttaaagcaacaattaaaaaattcatgcttattaatggcgatttatttgatgattcaatatggcgttaatgctagtttattacaagtggcatatccggatagaattagcgtgattggcttgtatatgctcatcaatttcgtgatattaatcggccaagttttgatattaaatttgattaattttgatatgaatggttatgccatcgtaattattgtgttaatcattaactttataatgcattatggggttgttcaaaacagcctttccagtttgtacgttagagggcatctgtaaaaattcggaggtatgtgatgttagacattaaagggttaaccaaaaaaattaaaaacaatctgatcttagacgaattagatttagaagttcagactggcgagttgattcacgtgattgggaccaatggctctggtaaatcaaccttatttaaactgatttgtcatatcatggaagctgatgcaggtgaaatagcgttaagcgagcaagtcacaattggtgcgttaattgaaaatccgtattttatggaaaatagttcggcacaaagtaatctaaaatttttagcagatattaatcgacagtacgatgaaaagctgattcggcaattattgacgcaatttgatttagattttgatagcccaacgcggttaaaaaaatattcgttagggatgcgccaaaaggttggcatcattcaagccattatggaaaatcaaaatttaatattactggatgaaccaactcgcggattagatcaaaaggcattaacgacgtttaatcggctgattgccgagttaattaccgaacaaaaaacgattattattgcatcgcatgataacctatcggaattaaatttcacgcgaaaattgcgacttgaaaatggtaaattggtagcgatatgagacgaaataagggcctattgctgttgattggtatatttcaaatgattatgttataccaatttaaaataaatagcggttcattaattgctatttattttggttttaatcagcaaattagtattttattacagatcatattctatagttgtttagaggtgctggttgttttgaagccgttaagtgcaatctttcaaattcaaacaatgctgaaaattagaatgaccgattttgaatttaaacgactaacattgatacacgcgttaccgtatagtttgctgttagcgatgactaacatcgggattagcttggcattagacaaggggccaatggtggccggtaatctacggctattaattagtagcgttatctgtgtattggtagcgaataagttgaaccaaaataagtttctgttttttatctgtttagggattgtatttctaagccgaatgctatttcagttatttttctaatcgttaaaaaacggccgtcatctcaatcgaggtggcggccgttttgtgtttaatgaataatatgactttttgcagctgcttcatgtagtttattaaaccaagggttaatgcgatctttaaggaagaggccgatgaagaagaagctaattccaaagagtgccagaatcgcaacattataccagaggtttggaccgtagatgccaccagttggttcacgcaacatgttgaccccgtaagtgaaaggcaacagcgggttaatgaactggaagaatgaatcggacaagacgacgggaaaattaccgcccccaccggaaattgagaggactaagatgatcatcgcgagccctttaccgacgttaccgaacatggcggctaacacatagacaatcgtcataaagaccatgctcaggaagatggcgagtaagaaaagggccagcttatcaacgacgtaagcttttaagataaagagattaccgatgaccacaatcgcagcttgggcaatcccaatcacgatataggttaaccaccgtgcgatgaattgttgtttcttcgtatatttcttttgttgtgcgtcgtctagactgaaattggttaagacgatattgctgagtaacagggcaccgacccagaggcatagcgctgtatagaatggggcgctagcggagccgtaatttttaatcggataaacgtgtttttcttttagtttaaccggttcggcgagaaagttactttccttagtcgcgtcacggcgcaatagtttaattaaatctttcaaatcaaccgttctttgttgttgacgaatcgcggcggcgcctttttgaatcccgctgcgcaagaacggccaatcattattaatcaggtcggttgcgtcgttcaaggccgttttgagttgtggaaatttagcgttggccatcgcaagggttgacgttaagtcggtttcgatgcccggtaaatcattgttaatgaagttggttgcgagctggagtttatttttaacggtcggataatcattttgatagaaggcactcgcggtatttaaaccagtgacaatcgttgacatattaccgtttagtagcgtattggcatcatgaacttcctgtttaattgccggaatctgtgcttcatatttctcaagataagtgatcgcagtttgcaaggtcttttgtgtgctggttaatagacttggcaatttaggcaatacttggctgtttaactgacttaaaacagcatcgccttggttaatcagtgtcgagaattggtctaacaagctggcaacggttgtgtcgattttagcggcttggatttgttgaatggttgcttgaacttgattttcaaaggcaatcacctgtttaattgcggtttgtaattcagttaatgaaagttgatcataattggttaagactgtatccaaatgcgccttaaattgccccaattgagtggcgaccaagcggaggttcttgattggcgtgtcgagttggtgtgattcgggttgaccagccgcggtggccgctgaattataagcatcttgtaaactttggagtgtgtctgccaattgggtgttttgtgcttggagtgtcgcaacgtgtgtctccaattgttgtagcgccacttttaaagcggctttggcttcaatattatcgggatcattttgaagcgcttctagttgctgattgactaaggttaaatcggtcgcaatattcttagcaatttgattggtaatcgttaggccttgatcaatcgcgctctgaatggcgggtaaagccgttttgagtttcggaattaaatcagttttaatctcgccggaaacgtcttgtgcgctctgactgaaactaatcaggtcaggtaatactttttgggttttgtttaaaacggttaaaccggttttagcttcgtcaatcccgttggtcagtgtgttggcaatcccgtcgaaatcgctgtcgatggtcgcgatttgttgaccaacttgttggatttcaggaattttaccttgaacggttgtcacgagttggccggttgcttcaacttgggggagatagctatttaggccggtgatttttttagccatcgtgttagcttggggtaaaaaggcggcaaattcgttagcctgtgccaatttgacttccatggccggaatctttttctgcagtgttagcacttgattcgtatactgattaatctgtgggatttgttgatccgttttaagaatcaaactcgaaaaacgattaatgaccggcaagttggcgtctaattcgaagccggccttgttaagcgtcgacattaaggtcttggcaacggtcgtgacaaattcatcagaaatagtcgattgcaaggtggttgcgcccgcactagtaatcttcggcgcaattgcgttaattttatcgttggaagaataaacaatcatcggtttttgaatttgaccatcaatgaagctaatcagatccttagagaagtttttagggatgtaaatgccggcatagtacttaccggttttaacgccttgatccaattgctttttgctggttgtaaattgccaacccaatttatcgttcttttttaattgaccaatcagttcatccccaatggcgactttcttatcagcgaccgtgatgctttgatcggcagaatagacggcgacttgtaaatcttgggttttgctatagggatcccacaacgcccagatattgaaccaggcgtaaagcgaggggatgatgattaaggctaatattaataggaaagcgaccggatttttaaaaagccgacgccaatcaagtttgaataattcggcgatattcttcatgcaggaactcctttaaatgggatcaatatttaaatagtttagcacataattaattcacggtcattattagttgtttcgcttcctggaaaataattaagatgattttaaatagtcagtctgccttatttttggtacaatcattgagagtacgaatgaactggaggaatggttgtgtttacaaaaaataaacaggcgctcccaacggacattgatcccgataatgtcccacaacacgtcgcgattattatggacggaaatggtcgttgggcgaagaagcgtttgatgccgcgggtagctggacacaaggcggggatggaaaacgtcaaagtgattaccaaagctgctagccggatgggcgttaaagtgttgacgctatacgcattctcaactgaaaattggaaacggccgaatgatgaagtccattatttgatgcagttgccggtcgatttttttggcgcttttatgccagaattaattgcggaaaatgttcaggtccaagtgatgggtaatttagaggcgttaccagctaaaacgcaacaagctgcgcgcgatgcgatggcagatacggcgcaaaataccgggatgattttgaattttgcacttaattacggtagtcgcgatgaaattcaacaagctgttcagcagattgctaaagatgcggttagtggtaagatagaacctgaatcgattgatgatgatttaattagtcagtatttgatgacgggtttcttaggccaatatgcggatccagaattattgattcggacgagcggtgaagaacggatttcaaatttcttactttggcaaattgcctatagtgaactcgtttttgtcgacgaattctggccagattttacacccactgtttttgaacaatcaatcttaatttaccaacatcgcaatcggcgttttggtggtttaaagtaaactgttactaggaggatctatttaatgaaacaacgtgttattacggcggttgtcgccttaattatttttattccaattttaattttcggtggcgtctttatcgatgtggctgcggcagtcttagcgttagtcgctttatcagaaatttttattatgcgtaaacgaatcatcgtttcaccagatgcgatggtcgccggcttagccgttttaagtttggtattaccaacgacggcgtttgactggttaccaactggtgtcagccaatttgatttattctacctattcattgctattttattagccatcacggttttcacgaaaaaccgggtcaattttgacgatatgggtgtcacaactttagcgagtctctacatcggtttaggtttccactatttagccgcaacgcggaatatcggtggctttgataccgttatgtacatcctattagtgatttggatgaccgatatcggtgcatacactttcggtcggatgtttggtaaaaataaactatggccagcgattagtcctaataagacatgggaaggttcaatcggcggcacactatcagccgtcgttgttgcagcaatttatttaatattcttcccacaagcttactcaatgcccgttatgattggcttaaccgttatcttctcaatctgcggtcaattaggtgatttagtcgaatcagcttacaaacgctattacggcgtcaaagattcaggcaaagtattaccaggccacggcggcattttagaccgttttgacagtatgttgttcgtcttaccattgttgcatttgtttggattaatttaatataaatataaagtgcgactgcgctgtttagcttctgagtatagcctaaaatggcgaattatgactggtttttagtcatgattcgccatttgtagctagaaggaagaagctagcgcaggagcacgtttcaaaccagagtgttgactcaagttggtcaggctttgaggattaacctagaactgggtgtcatgagtgttctttactcatggtgcccagttcgtagttaaccggaaaaggctacttgagaagcacgtttcaaaccagagtgctgactaagctgggtgcttccgagcattattccccaatctaaattaaacttaccatgacgcgtcaattctcatttaagaattggcgtgtttttttaattgtgccggtaataaattgttgggacaataccaagttaaacagttgacggatccgccgagtgtcgataggtgggcaacatcaacggcttggacttttttagaggtgtgttgttggaccaacttgatgattgcttgatccattttaagaccgtattggggaacgtagacagtcgaagtcgtttcagtcatgttgatatagagtcctttggccgacggaatttcggaatcgtattgaccagcagcttggtaactggagggtaaatcaataatggtcgtttgaggtaatgcacgttgcaattgctgtttgattttttgatgaccactaaaatcacccaatagtaggcagtccgggcttaagaaatgaacttgaccatcagcgtgtcccaaaacgtcaccgggttcaggggcaatcaggataacgtgagtgacttgtagttgtgacttgagtgtctgaattaaggcggatcgtgaatacgccggattatcttgtaagaccctagtggtgataatcacagtgtcacggccgttgtagatgcaattaccgccatctaagataatagcggatttaaggtagtcgaaatgttgttgatcgatccaatccgaaaaggctgattctaatgcagcgctttgttttttagggagataatcgggcgaatagcgaaacttgaccaagcgtgacgtcacgactggtgcgacatctttaatccagatatcgccatagggaatcgggatgctagtggtcgcccgttcaaattgtcggatatcttttttgaacggccaataataatgatcgcttaatcgaggacgaccggtgaagagttgtccttgtggatgtgtccattggggaatcgtcgttgctaaactaccggcgaacaataataagctgagtttacggaacatggtgaaacctcctttggttgattgccgttattatacaggctggttttgttatataatattaataaaaatataaagccgagctagcagcttaaattgatgcttgacaacttttttttaattaatattataattattttaaaagagaattaagcattatttttgagaaaaccagattcgtgatataatataacagttcatacttaaacaaagtctaaaatgacgcatctagaagggagtcgtacacaattggcggcgataattgcgtttatcattatttttggtattttagtagtggtgcatgaatttggtcatttctatgtggctaaacgttcaggcattttagtgcgcgagttttccgtggggatggggcccaagctctttgctacccggaaaaatggcacgacttatacgattcgctggttaccgttaggcggttacgtccgcatggcggggatggcggatgatgaatctgaaatcgaagcaggtacccaagcaaccctgattttgaacgatcagggccaggttcagcggattaatacgagcgataaggtgaccactttaaacggggtacctttccaaatcgctaaaaccgatctacaaaaggaattgtggttagaaggctatgaagccggtgacgaatccgaattaaaacggtattcagtcctgcacgacgcgacgattattgaagcggacgggactgaagtgcaaatcgcaccggtcgatgttcaattccaatcagcgacgttaatcaaccggatgttaaccaactttgccggaccgttcaacaactttattttggcgattgtggcctttatcctctttgcgatgttaagcggtggggttgcccagaataaggcgcaactcggcacaattcaagcgaactcacccgcgcaaaaagcgggtttaaaaaccgatgacaaactcttggccgttaatggcgacaaagtgacttcgttcacggatttcagtcaaattattgctaagaatccaaacaaaccggttcaaattaagtaccgacgggggcaacaaacgaagacggtcacggtgacgcccaaagcagtcacgcaggataaaaccaaagtgggtcaagtcggtgtcactgcgagtcaagatcatcggattatgacgatggttaaatacggcttcacgcaatcgtggtcgattgccagtcaaatttttaaagtcctcggttcatttttaaccggtggtttttcattaaataaattatcaggaccggtcggcatgtattcgatgacgactcaattcacagaacaagggtttaacgcgttggtctatttcttggccttcctatcattaaacttggggatcatgaacttaattccaattccagcattagatggcggcaagttagtcttaaacgtgattgaagcgattcgccgtaaaccactatcacccgaaaaagaggggattgtgacgttggttggggttggtatcatggtattattgatggtcttagtcacctggaacgatattcaacgctttttcttttagattacatttggaggcataacaacatatgaaacagtcaaaattatttattccaactttaaaggaagttcctaactcagcggaagccaaaagccatcgcatgatgttacgggccggctatattcaccaagtctcagcgggtatctatagttatttaccactcggttttcgcgtgttagataagattcaaacgattattcgcgaagaaatggacaagattgatgcgattcaaatgcaaatgccaagtgtgattcccgctgaattatggcaagaatcaggtcgttatgacacatacggccaaaacttgttcaagctaaaggatcgtcatgaacgcgactttatcttaggccccacgcatgaagaaacgtttactgatttagtgcgaaataacattaaatcgtacaagaaactaccattaacgttatatcaaattcaaaccaagtatcgtgatgaaaatcgtccacgctacggtttattgcgtggtcgtgaatttattatgcaagatgcgtattcattctcagccaacgaagctgatttagatacgactttccgtcaaatggaacaagcttacacgaatatttttacccgttgtggattagatttccgggccatcattggggatgccggggcgatgggtggtaaagattctaaagaatttaccgcaattgctgatatcggtgaagatacgattgtttattctgatcaaagccaatacgcggccaacttagaaatggctagcggtgttcgtcctagccaaagttcaactgacgttcaattggaaactgaaaaagtggcgactggcgatgcacatacgattgaagaagtcgcagctcgtttagaaatcacggcgcaacaaatcattaagagtgtcctctttatcgccgacgaaaaaccagtcttggttttagttcgtggtgattacgaagtcaacgacgttaaattaaagaacttcttgaatgctgatttcttagaaatggcaacgccagaacaagtgcaaactgttatgggcgcaccaatgggttcaatcggaccggtcaatgcaccagaagcagtcaaattagtcgctgattatagtgttgaagcgatggtcaatgcagtcgttggcgccaatgaagccgatcatcatctattaaacgttaacggcaaacgtgattttgctgaaacggactatgctgatttacgtttcgttcaagaaggtgaagcctcaccagatggcgaaggtaaattacaatttactaagggcatcgaaattggtcatatctttaaattaggcacacgctattcagaagcatttggtgcgactttcttagatgaaaacggccgcgctaaaccgatcatcatgggttgttacgggattggggttagtcgtttactatccgccattacggaacaacaagctgacgataacggcctcgtttggccaagcacgattgcgccatttgatttgcacattgtccccgtcaacgttaaagatgcggaccaagtgctattagcggaacaaatcgaaattttattagaagaagccggttattcagtattagttgatgatcgtaaagaacgcgcgggcgttaagtttgccgatagcgatttaattggcttgccaatccggattacggtcggaaaaaaagcgactgaagaaattgtcgaagtcaaaattcgtaaaacgggtgaaacactagaagtgaagaaagatgaattaatcaattcattaagtgtccttttagatagcaaacaatcagtcactgaataatcacgacgatattgtttaagcgtgttgagtttgtcacacgcatcaatttccgttcaaatcagaaaaccagtttatccttcgtttctgggtagactggttttctgacttgatactcaattaccagcgttaagggggcccttttgtggcattagatcaaacggcattgtttcagaaattattagaacaaatcgaattacctgccgatgtggcgaactatcccggttttaaaaccggtcaagtcgaacaagtcatcgtccatgaaaactcgaaggcgtggacgttcaaattgcattttgagacggtattaccttacgcggtctttgtgacgtttgaacaatatttggaagcggcgtttaagtccattgcgaccgttcaactcgcgatgacaaccgacaaaaccgaacttgatggtggtgtcttagcggcctattgggaatacgtggtcaatcatagcggcatccaatcgtcactattgcacgaactttgtgcgaaagagacaccttacatggacggcaagcaaacttatctagtcgttgaaaatgatattgttaaaaacttcttcattaaccaagcacaaaccgcgattcaagatggctatcgccgtttagggtttccgaagtttgcgattcaaccgttgattgatgaatccgcttcgcaaaaagcgattgaggatttccaagcgaaaaaagcggtccaagatgccgcccgagcgcaagccgcggctgaagccattaagaaaaatgaagcgcttaaagaaaaacgccaagctgaaggcaaaccagttgacggtccaattagtatgggccgcggcttaaaacccgacgaaccagcgcgtcaaatgatcacaattaacgaagaagaacggtcagtcgtgattgaaggttacgtcttcgataaagaagttcgtgtcttgcgttcgggccgtcaattgttaatcttgaagatgaccgattattcatcatcatttacggttaagaagttctcacgggatgccagcgatgaagggctgtttgccgccatcaatccgggcatgtggttcaaagttcgtgggagtgtccaagaagataatttcctccgtgatttggtactgaatgccaatgatttggtcgaagtcagtcatccgaaacgccaagataccgccgaaaatggtaaacgggtcgaattgcatttgcacaccaacatgtcgcaaatggacgccactaataaaattggcgacttcgtcaaacaagccgccagttggggccagtccgccattgcggtcaccgatcattacaatttacaatcgtttccggatgcgtacgccgcgggtaagaagaataacgttaaaattctgtacggcgtggaagtcaatctcgtcaatgacggcacaccagtcgcctataatttacgcgacgaagttcttgaaactgccgaatacgtgatttttgatgtggaaacgaccgggttgtcggccgtttacgattcaattatcgaattagccgccgttaaaatgaaaaacggtgaagtggtagcttcgtttgatgaatttatcaatcctggtaaatcgttatcggcgtttacgacgcaattaaccagtatcacgaatgaaatggtacaagacgctaaatccgaagccgccgtcttggcgatgtttaaggattttgctggcgatgccgttttagcgggccacaacgtcacgtttgatatgggcttcttgaacgccggttacggtcgtaacgagctaggtcaaatcgaaaatcccgtgattgatacgttggaattatcacggatgttgcacccagaatataaaaatcataaattagattcattaacgaaacgctacaagattaacttggaacaccatcatcgcgccaatgccgatgcggaatccactggttatttattgtacaaattagaaaccgaagcggccacgcgctacgagatgcttaacgtcaatcaattaaacaatcgagtcggtgaaggcgattcgtataaacaagcgcggccagcccacgccgttttgatggcgaagacccaagctggtttgaagaacttattcaaattagtttcggcgtcaatgaccgaatattattaccggacaccacgcttaccgaagagccgtttagacgcattgcgtgaaggaattatcgttggttcggcctgcagtagtggtgaggtcttcgaagcgatgatgcaaaaaggttatgaagaagctcgcagtcgggcgaagtattacgactacatcgaagtcatgcccaaagccgtttacgcaccgttgttggaacgtgaattggtccaagacgaaaaagctttggaagaaatcattgccaatttagtcaagctgggtgccgaacttggcaaaccagtcgttgcgacgggcgatgcccattatctaaacccggtcgattcaatttatcgtaagattctgattaattcgatgggtggcgctaatccgttaaaccggtcgaaattaccagacgtccatttccggtcaactgatgaaatgttgaaagcttttgcctttttaggcgctgataaagcccaagaaatcgtcgttacaaatcccaatgcgctagccgatagtctcgatgaaattgtgccggtcaaggacaagttgtatacgccgaagatggaaggcgctgaagatgaaattcagaccctgaccatgaatcgggcgcacgaattatacggtgctgaattgcctgcgattgtccaagaacgcttggataaggaattgaagagtattattgggaatggtttctcggtgatttatttaatttcgcaaaagctcgtgtataagagtggtaaggacggttacttggttggttcgcggggatcggtcggctcgagtttagttgccacgatgaccgggattaccgaagttaacccattgccaccgcattaccgctgtcctaactgtcattattccgagttttataccaagggtgaagtcggttcgggttacgatttagacgataaaaattgtccgaaatgtgatacaccgctcgataaagatggccatgatattccgttcgaaaccttcctaggcttccatggggataaagtccccgatatcgatttgaatttctcgggtgattatcaatcggtggcgcataattatacgaaagttttgttcggtgaaaataacgtgttccgggctggtacgattggcacggtcgccgataaaacggcgtacggttacgtcaaagcttacgaacgtgacacagaacaaactttccgagcggctgaaattgatcgactcgccaaggggtcaaccggtgtcaaacgaacgactggtcaacatccggccgggattatcgttgtgccggattatatggatatttacgactttacgccaatccaatttccagccgatgatcaagatgcggcttggaagacaacccattttgatttccattcaatccatgataatatcttaaaactcgatatcttgggccatgatgatccgacgatgattcggatgctccaagatttgtcggggattaaccccaagacgattccaaccgatgatcccggtgtgatggcgctcttttctgggaccgattcgttggacgtcacaccagaacagattaattcgaagatgggcaccctcggcgtaccggaattcgggacgcgttttgtccgcggaatgctcgaagaaacccacccaacgactttctcggaattgttacaaatttccggcctgtctcatgggaccgacgtgtggttaggcaatgccgaagagttgattaacaaaggcgtcgtcacgttgaaggacgtgattggttgtcgggataacatcatgatggatttaattcattgggggatggacgacagcatcgccttcaacatcatggaacgggtccgtaagggtaaagggattccggatgactggcaacaagccatgcgtgaaaatgagaacgtgcctgattggtacatcgattcttgtttgaagattaaatacatgttcccgaaagcccatgcgaccgcctatatcatgatggcgttgcggattgcttatttcaaagtttatttcccgattatttattattgtacgtatttcagtgtgcgcgccgatgacttcgacctcgtggcaatggcccaaggcaaagaaggcgtcaaggcccgcatgaaggaaatcaccgataaagggatggaagccagcaccaaggaaaagaatttgttgacggtcctcgaaatcgccaacgaatgtttggaacggggtatcaacattaagatggtcgatgtcgaaaaatccgactccgccaacttcttaatccaagatgaccacacgttactcgccccatttagagccgtgcctggcctcggcgataacgtcgccaaacaaatcgtttccgctcgcgaagaaaagcccttcttatccaaagaagatttatccaaccgtggtaaagtttccaaaaccttgattgaatacatgacggtcaacaacgtcttgtctgatctaccggatgagaatcagttgtcgctgtttgatatgatgtaaccaaatagacaagctagattgcgaaggcaattgggcttgtctattttaataaggattaattaatagtataatttgattaaatgcaatgctgggaggatcctttaatgtcacatctaagaccgataatatatgaaatgggttataacaaagatgttatcaatcaagatattatcaaagaagatgataaaaaatacatcttaagttatccaaccgtttatattgtgcaagacgtcgatcggcatgccggatattctgtctacgttggcgaaacaagtgacattaaacgacgaacaatcgaacatattagcatagattctaaagaaagatctgattggcgagaactcgctgattctgaatcggctgagatgtacgttatagggcatgaacattttaacaaatcgatgactttagatatcgagaataaaatgatgcaatatttagcgagtgtcgatgttgttaaaaaagtgaataatcgtcgcactaatcaacaaaatatgtattattcatatgacgaaatggaagagatattttctaagatttggcgaaaattaagaaccttcgacccaaaattatttccacttgagaaaacaattcgagactcagctttatttaaagcatccccattccataagttaacagaagaacagttggctgcgaaagataaaattatgcggcgtattgaaactaatttggctaataaagccggagtgggcacgctgatagtagttgaaggcgatgctggttcaggaaagaccgttttaatgagcagtcttttttatgaacttaatcagctagccaaagaaaattcagaaactcagcagttgaaaggtactagccagtttttgttagtgaatcatgatcagcaattaacggtttatgaggaaatcgctaaaaaattggatattttaacgcatgatgggcaaaagaccgttttaaaaccaacaccttttattaacgcacatccgcaagaggaacccgtggatgttgtcattgtggatgaggcacatttactgttaacgcaaggcaagcaatcctatactggtaaaaatcagcttgatgatttattacaacgggcacgggttgttgtggcggtttttgataggaaacaaattttatcgcgtgaacaatattggacaccagaacaattagagacgctattagctaaggttaaaagtgagggcaatcacattgctctcaataagcaattgagaataaatgcaggtcaatcaacaattgattggattcgcaatttagtcgatctgaaaacgattgggacattgcctaagaaagattctaaggggtacgaaattcggttttttaactcaccagatgaattacagaaagccattttcgaaaaagcacagaatgaagattctggtatttcaaggttactagcgacttttgattggccatattctgggaatagagataatgagggccagccatggtacgttaaaattggtgattggcagatgttatggaacttacaatctaaattaacgcgtcaacaaaaaagacttaacaaggggttagcgtgggcagaacaaccgcaaacgctgaatgaagttgggtcgacctttacaattcaagggtttgatttgaattatgccggtgtaattattggaccatctgttaaatatagaaatggtagaattgtttttgataagtcacagagtgaaaatagtaaagcaaaacaaagaagatcgttagatagtggtcttaaaattgatgtttcggaagaaatgttgaataatgaattgaatgtgttactctctcgaggggttaatggtctgtatatttatgcggtcgatgatgctttaagagcagcactgcagtcggaggaaatcaaatatgaatagcatggaaaaaattaatcaatttagggatgatcgaaattggcggcagtttcataatgaaaaggatttggcattatctatttcattggaagcctcagaactactagaactttttcaatggaagacagcagcagaagggactaaagatatcgagcgggtgaaggaagaactagctgatgtcttaatctatagttacatgatggcagacaacttaaatttggatattgatgatattattgaacagaaattgattaaaaatgctgagaaatatccagtaaaaaagattaaataatataatagaaagaaggctcagtacggctagattctatctagctttactgagtcttcttttatttaattacgcccgtaatatctgactcatcattcgtcctttagccagttcatcaatcaatttatctaaatagcgtactttttgcatcagagggtcttcaatggtttcgacgcgaatgccacagacgacgcccgtaatcaggtgacagtttgggttcatctgtggggcttcatcgaagaatgcttggtaggtgataccttttgcaagttgagcatcgagctcggtctgagtgtaaccagtcaaccagcagataatctgattaacttccgcttgcgttcgctgtttacgttcagctttctgaacgagtagcgggtagactttcgtaagtgacatggtggcgatgttagttcgtggcataatagtcctccttagaagtgcacttttatgttcaagaatcgaaaaaaataaagggaatttcaaccaaattatagcgttgtaatcgtttatttgtaaagaaaagtaactggtccaagcatgttgtcgattggaattgattgctttcattaataaagcggattggaggattaaaatccccaactcctaccattgtattttcatgaaaattatgttatattgttatcagtaattagatacttcgggtgagtgagcagaaatgctcactctttttattggagtttgcccaaagttgctaaactgaaactatagatgaattggagggaatcatttgagtaccgttgtggaaacagtccacgatcttgtcgggccaatactagatcaacatcattttgaattagtggacattgaatttgttaaagaaggcagtagttggtatttacgcgtcttcattgataaaccaaatggcattgaccttgaagattgtgcgttaattaacgatgcgttaagtgagaaactggattcaatcgacccggatccaattccgcaagcttatttcttagatgtttcatcaccaggcgctgaacggcctttgaagaaggaagctgattatcaacaggcattaggcgactatattaatatctcgctttatcaagccgttgatggtgaaaaaatatatcagggccacttaaaggccattgatgctgacacgttaacgatgtccatcaaaattaaaacgcgtcaaaaagaaatgacatttaatcgcaaggagattgccaaagctcgcttagcaattgaattttagtaaaggtaggctagatacatgagcaaggaaatgttaggcgctttaacggcgctcgaggaagaaaagggcgttaaaaaggaagtcgtcattgaagccttggaagcagcacttgtgtctgcatacaagcgcaactatggccaagcccaaaacgttgaagttgaatttgattctaaaaagggcaacattcatgtgtatgctgttaaagaagtcacggatgaagtcttcgattcacgtcttgaagtcagttataaagatgcacttgaagtcaacaaggcttatgaagtcggtgatacgattcgttttgaagtcacgcctaaagattttggccggattgctgcccaaacagcaaaacaagtcattatgcaacgggttcgtgaagaagaacggaacatcatctacaccgaatacagccaatatgaaaatgaaatcatgcaagggattgttgaacgtcgtgataacaagtttatctacgtcaaccttggcaagattgaagctgtcttgagtaaacaagatcaaattcctggtgaagtttatcaagcacatgatcggattaaagtttatgtttcgaaagttgaaaacacgactaagggcccgcaagtgtttgttagtcggacacatccagacttagtgaaacgcttattcgaacaagaagtgcctgaaatttatgacggaacggtcgaaatcgtttcaatcgcgcgcgaagccggcgatcggactaagatggcggttcgttcaactgatccaaacgtcgatccagttgggacttgtgttggtcctaagggtcaacgggtgcaactcgtggttaacgaattacacggtgaaaacatggatatcgtgaagtgggaagaagatccttcagactacatcgccaacgccttgaacccagccgaagtcattgccgttcaattcaacgatggtgataacgatcatagctgtaccgtcattgtgccggattaccaattatcattagcaattggtaaaaaaggtcaaaatgcccggttagcggctaaattaaccagttataaaattgatatcaaacctgaatcagaagttgaattcgtcgacgaagatgatgccgctgaagatacaacgcctgttgaaggttttgaagaacaaccacaagaataagtgagggttcatgatgaaacaaagaaaagtcccaatgagaaaagacattatttcgcaagaaatgaagcctaaaaaagaaatggtgcggattgttaaaaccgctgaaggtgagattagtattgacccaaccggcaagaaatccggtcgtggcgcttacgtctcgttagaccctgaagcaattaaagtcgcacaaaccaagaaaattctagaagccacttttagcatcgacgtttctgaagcattctatacagaattattcgaatacgttgatcatcaaaaagcgcgtcaagaattgtttggagcaaacaaatgacccaaggacaaaaaccagaccgtttattgcaactcttaggaatctgtatgagagcaaggcaactggtcagtggagaagaacaagtgttaaaagccattcagcagtcaaaagcgaaattggtttttatcgggagtgatatcagtccactgaccaagaagaaattgaccgataagggccttttctacgaaatcccaaccactgaggcgtacacggcggctcaattaacccaagcaattggattacatcgcgccacgatcgccgttatggatgctgggtttgccaaaaagatgataacgctactgggataataaaggagcgtgaagatatgggtaaaaaacgtatctatgaactagcgaaagaaattaatgtatcaagtaaagatttattggaaactgctgaaaagaagggctatgattttaaaaatcatatggcctctattgatgacggtcaagaaaagacgttaagagcggctttttcaaagaatcaaccagcggctaaagcacccgttcaaaaagcaccaactgcagcacaaaaggcaacaacgactgttgcgcctaagactgcagcgccaacagcacctaaagcagatgctaaacctgctgctgttaaacccgcagcaccagtcacaccaaaaacggcgccagcaacgcatcatcaagctggtgaaaaaacagaaagtggtaagattaagattaataaagctgccattcgtcgtcgaccagaagccgacaagaaaccaacgcatcattcaacaactcaacggccacaacaaggccaaccaacgcgtacgcaacaatcaaacggccaagctcgtcctaataatacgaaccaaagccgtccaacgagcaatgcgcgtcctaataatggtcaagcccgtccaacaaataatcggaatggcgctaccaaccaaagtcgtcctaataacgggagcagccgtccaaccaacgggaacaaccgcccagcaagtgctaacaagccaatgagtttgcaagaacaaatctcacaagctaacgcacgtcgtcaacggggccaagaacggattcaacaacaacgcgaacaacgcgaagctgatgaaaagaaacgtcgcgaacaacgcaaccggccacggccagctgctcgtcccggtgctactaacagtagtaacggccgtccagcaagcgcaagcaaaccagctggtgctggtactactcgtccaacgacgaataaccgcccagcccaaaatggccaaagccgtcctaacacgacgaataaccgtccaagtaacaacacgagccgcccagctaacaagccagtgacagctcaagaaatgcaaaataagatgcaatctaatacggttagtgctagtcggccagctgcaaaaccagcaactgctgctgctagcaagcctaagaacttcggcccagataagaaacggggcggtggttacaacagttatggtaataaccaacaacgtttcaacaagcgtcgtaagaagactcgtaagcaacaattagcggatcaaaatgctgctaagaaggaaatgccacaacgtaaagatcggccattaccagaagtattaatcttctctgaaggtatgaacgtggcagatattgctaagaagattcatcgcgaaccagctgaaattatcaagaagttattcatgttaggcattatggttaacatgaaccaatcacttgataaggatacgattgaattattagcgactgattacggtattgaatcagaagaaaaagttgaagtcgatatcgctgatattgattcagtctttgaaactgaagctaagaatgacgaaaacttaacgggtcggccaccagttgtcacaatcatggggcatgtcgatcatggtaagacaacgttattggataacttacgtaacagtcacgtaactgatggcgaagccggtgggattacccaacatatcggtgcttatcaaacacgtttaaacgatcgtttaattacgttcttggatacgccaggacatgcggccttcactaacatgcgggcccgtggtgctgatattactgatatcatcatcttggtcgttgccgctgatgatggtgtcatgccacaaaccattgaagctatcaatcatgccaaagcagcgaaggcaccaatcatcgttgccgtgaataagattgataaagaaggcgcaaatcctgatcacgtgatggaacaattaatgggttacggcctcgttcctgaagattggggtggcgacaccattttcgtcaagatttctgctaaaactggtgaaaatattgatgaattattggaaatggtccttcttgaagctgatgtgcttgaattgaaagctaatccagctcaaaaagcggttggtaccgtgattgaagcccgtcttgataaaggtaaggggccagttgcctcattactcattcaacaagggactttaaaaattggtgatccaatcgttgttgggaataccttcggccgtgtccgggtcatgactaatgatcgtggtcgtcgggttaaagaagtcttcccatcagaaccagttgaaattactgggttaaatgatgtgccacaagctgcggatcgtttcgtcgtcttcgaagacgaaaaaacggcgcgggctgctggtgaagaacgtgctaaacgtgctttattgaaagaacgtagccgttcaaaccctgtcacattagataacttatttgaaacaatgaaacaaggcgaattgaaagaagtcgacgtgattattaaagccgacgttcaaggttcaagtgaagccttagccggtagtttacggaagattgaagtcgaaggcgtccgcgtgaatattattcatgaagccgttggtgcgattaacgaaagtgatgtcacattagctgctgcaagtaacgcgatcattataggctttaacgttcgtccaacaccacaagctaagattcaagccgattctgaacaagttgatattcgtttacaccgaatcatctacaaggcaatcgaagaaatcgaagctgctatgaagggcatgttagaaccagtctttgaagaaaaagtcatcggtcaattaacggttcgtgaaacttataccgtttctaagattgggacgattgccggttgtatcgttgattctggtacaatccaacgtgatagtggcgttcgtttaattcgtgatagcatcgtgattcacgaaggcaagctatcaagcttgaaacgctttaaagatgatgttaaagaagtcggaactggttttgaatgtggtgtaacaattgaagattacaacgatattaaagttgatgatcaaattgaagcttacgtgatggaagaagttcctgttaaataattaatttacgggaggatcagctatgaaacatcgtgtcggacgtgttgaacaagaaattcaacgtgaagtgaacgatattctcttaaaaagagtacgggatccacgtgttgaaggggttacgattacagatattaatctaaccggtgatttacaacatgttaaaatttattacagtattttatctaacttagccagtgatgctgaaaaagcacaatctggtttggataaagccaaaggattgattcggatggaattagggcaacggattaagttgtacaagattcctgaaatcacctttgaacaagataattcagtgcgttatggtgaacatatcgatgaattattgcgtaaattgcatcaagacgaagcacaacgttaatctgtgctaaaaagggcggtccgataataggggccgccctttttatatgctataatgaaacagttaattcactaaaggagactattatggacggcattttaccattatataaagaacgcggcatgaccagcagtgattgtgtctttaaagtgcgacgcattttacacactaagaaagtgggccattctggcacactggatcccaacgtggacggtgttttaccgatttgtatcggacaagccactaaagtggtcgatcaattggttcattccggcaagatttataccggtgaaatcacgattggtctttcgacgacgaccgaagatttagacggtgagattgtcgaagaagtcaaaatgactgaaccattatcaaaagaaacgattgaaacgacgctcgctagtttcttaggtgattcgattcaaattccaccgatgttttcggcggtgaaagtcaatggtcgtcgactctacgattatgcgcgcgccggtgaaacagttgaacggccccaacgatcaatcacaatttctcaatttgatttagacggtgaaatcacgtttgatgaagcgactggtcatcagaagtttcgcttcgtcgtgggttgttcgaaagggacttatattcggacgctcgcggttgatttcggccggaagttaggattaccagcagttatgtccgacttgacgcgtttaaagagtggtgggattcaaatcggagattgtgtgacgctcgcgcaactaacggagaaaatggaagccaatcaattagccgacgtgttaattccgttggaccacgtttttgctgatgttgaacaagttgtattggatgacgatcaatgggccaaagtgctcaacggcgttttcttaacgtttgaaaatcagaccgctgaccaattagcattgacttatcaagggcacattaaagccatctaccaattggacgctggtcaagcccacgtttatcgaccatttaaaatgtatttacaaaatcaaggtactcattaaaaaaatcaggtgaaaaacatgcaagtcattgaattagttcatccctatgcacccactcaaatcaagccaacaccagtggttttagcgttaggcttttttgatggggttcatcgtgcgcaccaagccgtgattgaaacggcgcaaaaagtggcacgcaaaaaaaagatgcctttagcggtcatgacgtttaatattcatcccgcgattgtctaccgtcacgtgaacgaagcgagttttcgttatttatcgacgactgaacgcaagcaagaattgatggcggacttaggcgttgatattttgtacgtcgtgcattttaatccagctttcgcgaagcttgcaccccaagcgtttgtcgatcaatacttggttgccctacacgctgatacggtggttgctggttttgattatacgtatgggcaaagagcagttgcgaatatgcagacgctcgcgtcatacgcacagaaccgttttgaaattgtaacggtggctgaacatgattatcaaggcactaaaattggctccaccttaattcgagaagaactcgatcgcggtcagattgatgccgctaaccaattattagggtatatttatcgaacaactggcgaggttgttcacggtgaagcgcgtgggcgcgaactcggctttccaacggctaatattgccgcaacccagcccgaacggttaccagggattggcatttatgctgtccggatgtttgtccgtgagcaatggtatctggggatggcttcgattggccgcaacgtgacgtttcatgatgataacccggtcacggttgaaattaacttgctcgattttaacggcgacatctatgatgaaacggttaaagtcgaatggcaccactatttgcgtggcgaagtgaagtttgaatcggccgcacaattaattgaacagctccatcaagataaagctgatacacgagcgtattttaaagaattagaggggtaattaaatggcgggtgcttatatccatatcccattttgtgaacatatttgttattattgtgatttcaacaaggtttttattgagggccaaccggtcgatgattatgtcgacatgttaatccgtgaattccaactagtcatggcggaacatcctgatgaacccattgaaacgatttacgtgggtggtgggacaccaacgacgctctcaccagcgcaactgcaacggctattagatggtattcatcaatatttaccatttaaaggtggcgaattcacctttgaagccaatcccaacgatttacaagacaccgcgaagttgcaggttcttaaggacaacggcgttaatcgtttaagtattggggtccaatcgtttaatgatcaaatactgaaaaagattgggcggattcatcgcagtgcggatgtttatcgcgcaattgataatgcacggcaagtcggttttgagaatatcagtattgatctgatttttagattgcctgatcaaagtgaagaagattttatggatagtctaaccaaagcgttggcgcttgatttgccgcactattcaacctattcgttaattctggaacgcaaaacgatattctataatttaatgcgccaaggtaagttacgtttaccatcgcaagacgttgaagcgcatatgtatcaagcggcgattgatagtttccaaaaggcgggtttagaacaatatgaaatcagtaattttgccaaacccggttatcaatcagcccataatttaacgtattggcgcaatgaaaagtatttcggttttggggcgggtgcttttggttatctaggtaaagatcgctaccataacttcggcccaattcaacagtatctggaaccattacacgacaataaagtgcccgtgattgaacgtcacgttttaccgttaaccgaacagatggaagaggaattattcttaggattgcgaacgatgcaaggcgtgtcgatccaacggtttcaagaaaaattcaaaatgccactccaagccgtttacggcgataccgtcgccacgcagattgcgaaaggttatttaaaacaagaaggcgactggttacgcctaacggaatccggcaagttcctaggcaacgaagtcttccaagaatttctgttagacgaatactaagtgctgaacaagccgataagcttctgagtatagcaacatatcgcggattatgacggtttatgtcatgattcgtgatatgttgctagacggaagaagctggcttgagaagcacgttaaagaaacgaagtgctggttcgaactggtcagactttgaggattaacctaaaagcgataattatgggtggttttacccatgattattgctttgtagttaaccggaaaaggctagttcgggaagcacgttaaggaaaataagtgctggttcgaactgctcagattttgaacattaaccgaagctagatgtaagaaaggctgttcaaccaaatcattttggttgaacagcctctttgtttggcatcgctctgactggagactggtcgcatatcagtctcgagaccgattttgctgaaaatggtaaaaaaaacggtccgattcttgactttatttgacgttcttgctatattaatacttgtaattagcactcgtaataatcaagtgctaaaaagaggtgataacatgctgaccgaaagacaattaatgattcttaaagaaattattcgtctttttaccgagagtggtcagccggtgggttctaaaaagttaatggcagaattaccaatgcacgtcagttcggcaacgattcggaatgacatggctgatttggagagtgtcgggttgattgaaaaaacccattcttcttccggtcgagtgccttcgatgaaggggtatcgttattatctagatcacctgattcaaccggcaacgctcaatccaattgatgtcgcgacggtgcaacaatcgtttggtcatcgttatcataagattgatgaaattgtgtcccaatcagcgaatattttatccaacctaaccagctacacggcgattacgttaggcccggaagtcgctgagattcgtttaaccggttttcgattggtaccgctcagtaatcaccaggtgatggcgattattgtcacgagtgccgggacggttgataatcaagtcttctctatttcgcaacatatttcgggagacgagcttgaaaaggcgattcggattatcaacgaacatctggtcggtctaccgttaacggtggtcagtcagaagttgaagacggaagtcccagcactgttaacgcagtacatggcttccccaggtggtttcttgaacatcttcgatgatgttttgaaacaagcctctcaggaacggttatacgttggtggacagatgaatttgttgaacttctcgcagtttgcggatgttgatcaactgaagtcaatctataatatcattaatcaatcagacgatttagcgaagttgttggatttgtcacccggcagtgccaacaatcaggttcaagtccgattaggcgatgagatgaccaatgagctcttgaagaattacagtctgatgactgtcaattacgatgttggcgaacatggtcaaggtctgattgctttattaggccccactagcatgccttattcccggatgatcggtttattagacgtcttccgtgaagaattagcgagaaaactaattgattattacgccgattttgacgataatcaaacttaaaggagtgtgtttgtttgacagagcaagaccaatcagtagacgaaactaagacaccggttgaaccagcggaaccaaccactgaaacaccggagcaagtagttgaaactgataagacagaagccactgaagaagttgtggaagatcaacctttagttgacttacaaaagaagtatgacgatttagaagatagctatttacgctcacaagctgaaattaaaaatatgcacgcccgccatcaaaaagaacaagccagcttgttgaaatatgatggtcaagcgttagctaaagatgttttacctgttttagataatttagaacgggccttagcaactgaagcaactgatgataatggtgaacaacttaaaaaaggcgttcaaatgacttatgatcatatgcttaatgcgctaaaagaccacggcgttcaagaaattgaggccgcgggcaaaacctttgatccgaccattcaccaagccgtccaaacggtggctgttgaaggagatcaaaaagcagacacagtcgttcaagttttccaaaaaggttattatttgaaagaccgtgttttacgcccagcaatggtcgttgtcgcacaataattaattaaaaaatttaaaaaaagagggaattaataatgagtaaagtaattggtattgatttaggcacaacaaactcagcagttgccgtattagaaggcggccaaccaaagattattacaaatccagaaggcgcacggacaacaccatctgtcgtttcgttcaagaatggtgaaatccaagttggtgaagtggctaaacgccaagcaatcactaacccagacacaatcgcatcaatcaaacgtcatatcggcgaagctggttacaaagtcacagttggcgataagacttatacaccacaagaagtttcagcaatgattctccaatacatcaagaaattctctgaagattatcttggcgaagaagtcactgaagccgttattacagtgcctgcttacttcaatgattcacaacgtcaagcgactaaagatgctggtaagattgccggtcttgaagttaaacggattatcaacgaaccaacagcttcagctttagcttacggtttagacaagactgaacaagaagaaaaagttttagtttatgaccttggtggtggtacttttgatgtttccgtccttgaattaggcgacggtgtcttccaagtattatcaacaaatggtgatacacatttaggcggggatgatttcgatgacgccgttattgcttggttagttaaaaatttcaaagctgaaaacggcattgatttatcaaaagacaagatggctatgcaacgtctaaaggatgctgctgaaaaagctaaaaaagatttatctggtgtcacaagcactcaaatcagcttgccatttatctcagctggcgataacggcccaatgcatttggaaatgacgttatcacgtgctgaatttgataaattaacttctgacttagttgatcgtactcggatccctgttcaaaacgcattgaaagatgctggtttaacagataacgatatcgacaaagtcatcttaaatggtggttcaactcggattcctgctgttcaagaagccgttaagaactggactggcaaagaaccagatcattcaatcaaccctgacgaagccgttgcaatcggtgctgctgttcaaggcggcgttatctcaggtgatgtgaaggatgtcgtattacttgacgtaacacctttatcattagggattgaaacaatgggtggtgtcttcactaaattaatcgaccggaacacaacgattcctacaagtaaggctcaaacattctcaactgctgctgacaatcaaccagccgttgatatccacgtcttacaaggcgaacgtccaatggccgctgataacaagacattaggtcgtttccaattaactgatattccagctgcacctcgtgggatccctcaaatcgaagttaaattcgatattgataagaacgggattgtcaatgtttctgccaaagatttaggcactaacaaagaacaaaaaatcacgatcaagagttcatcaggtctttcagacgacgaaatcgatcgtatgatgaaagaagcccaagaaaacgaagaagccgattcaaaacgtaaagaagaagttgatttaaagaacgatgttgatcaattaatcttccaaactgataagacaatgaaggaacttgaaggcaaagtttcagatgacgaattacaaaaagcaaaagatgctaaagaagaattagtcaaagcacaacaagaaaacaatcttgaagacatgaagacgaaacgcgatgcgttaagtgaaattgttcaagaattgacggttaaattgtatcaacaagcccaagaagctcaaaaagctgaaggtgcagatgcaaccgatgctaagactgatgatagcactgtcgatggggacttcgaagaagttcacgatgacgacaagaaataatgtactttaaaaaaggccaaaacctagtatggtctagggctttggctttttttaagccaaaaattatgctattcttgttaaggtagattttacgtgagtaagtaaatgaatggaggcccacaatggctgataaaagagattattacgaagtcctaggcatttcacgcgatgcctcggacgccgatattaaaaaggcttatcgtagcctttctaagaagtatcacccagatatcaataaggccccagatgcagaagctaagtttaaagaagtcactgaggcttatgaggccttgagtgatccgcaaaaaagagccgcttatgatcaatacggtcatgctgggatggatcaaggttttggcggcggtggcgccggtcaaggctttggtggattcggtggcgaacaaggcttcggcggtggtggctttgaagacatctttagccaattctttggtggtggcggcggtggtcgtcaacaacccaatgctcctcgtcaaggttcagatttacaataccggatggatttgaaattcaaagaagcgatttttgggaaagaaacaaaagtgtcctataatcgcgaagcagaatgtcatacctgtcatggttctggtgctaaacctggaacgagcgcggagacgtgtcataaatgtcacggtgcgggtcaaattcaagttgaacgccaaacaccactgggtcgtatgatgtcacgcgaaacgtgtgatgtctgtggtgggactggtaaagaaattaaagaaaaatgtaccacttgtcgtgggaccggtcgtgaagacgaacgccataccgttaaagtgacggtgccagcaggtgttgaagatggtcaacaaatgcgtcttcaaggtcaaggcgaagccggcacgaacggtggcccttatggggacttgttcatcgttttccgggttgaacctagcaaggaattcgaacgggatggtgctcagatttatgtcgaagtgccaatcacgtttgcacaagccgctttaggcgacgaaattgaagtcaatacggttcatggtccagtcaaactgaagattccaagcggcacgcaaacccatacgtcctttagattacggggcaaaggggtgcctaagttacacggtaacggcaatggcgatcaaaatgtgaccgttaaagtcgtgacaccggataacttaaatgcgaaacaacgtgatgcgcttaaagcgttcgcagttgcgagtggcgattccgttaatccgcaagacagtaatttgtttgataagattctaaataagaaacataaaaaataagtggtgtcagtcatcgtttattaatgaagaccaaattaaaacccgttattatccaagaaatctggataataacgggttttgttttggttaccaatcgattagtgtttttggccttgttgactgtgacgataaccgtaagtgaagtagatgatgaggccaatcacgagccaaacggcgaagaccatccaagtcacggcttgcaattgcgtcatcaagagcacgcataatagacaagaaacgattggtaatacggggtagagtgggactttgaaaccggttggtaattctgaatagaatggcattttacgtaagaaaacaatgccgagtgaaaccgtcgcaaaagcgaagagtgtcccgatattaaccagttcggtaattttatcgagtgggacgaccatcgcaatcacgctggtaatcacggcaaaaatccaagtattcgcaactgggacgtgagttttcggactaacttttgcaaaaatggcgggtaatagaccatctcgactaatcgcaaagattaatcggctgccaccgtaagacatgaccagtagaacggtggtcataccagccacggcccctaaagcaacgacaccggcaatccaattttggtgcatgaattgaagggcgaacgcaactggatcaccgacgttcagttgcgtgtaatggacgacaccgactaagacggctgccacggcagcatataacagtgacgcaattcctaatgacgcgataatcccaatcggcatattccgttggggattgatgacttcttcagaggccgttgaaacggcgtcaaagccgatataagcgtagaaagcgaaagcagcccccgataggacgccagcgccaccatagggcaagaatggccgataattagcaggcttgatataaaagacggcgactccgatgaaaatcgcgattacgacaactttaacgccgaccatgatggtattgatgcgagttgattcttggagtccgtttgacaataagaaaccaatgattaaaataattaaaccagcgattagattgatactccccggttggcctggtgtccaagccgttgaaattattttagggagatgaatgccaaaaccggctattaaattttggaaataagcggaccaactcaccgcaacggaagcgaccgcgaagaggtattcagaaatgagcgcccaaccgagtaaccaggcgatcagttcgccaaaaacggtgtaggcgtatgtataggcgctaccagcgagcggaatcgttgacgcaaattcggaataacaaagagcggctagcgaacagacgactgcggctaacaggtaagaaagcatcgcaccggggccggcgtatttagcggcgacaattccgggtgtgataaaaatcccagccccgacgacggcaccaacccccatggcagttaggccgaaagcggtcaaatgacgttccaacggactgtttttgaattgttctggattaatctgtttcttagtgaataacgaatgatttcccatagcaaactccttatgaaaatgattaaattttaattagttaattttaatcgttttaggggttaatcgtcaagcttaattttcagaaaattataaaaatagtggtagtatgcagccataacgtgctttccagccaacttcttccgtctagctacgaattgcaagttatgactaaccccagtcataactcacaattctaggctatactcagaagctgatcggctggatttagcacttcgattataacgtgcttctcaagtagccttttccggttaactacaaaatcagcgttatgattcagagtacaaatcataacgctgatttctaggttaatcctcaaagcctgaccaacttgagtcagcactcaaactataacgtgctaactcaagcagacctttccgcctaactacaaaattgcccatatgattaaagttcaaatcatatgggcaattcttaggttatgctcaaggtcaaaccgcttgtgtgagcacttctttataattaatgctcagtcgttatccgcaactcaacacacttacttggttattttaaattaaattccaatggcggaggccttcgataatgccgccttcggtatttttgctggtgatgtattgggcttgagcttttgccgcttcaataccgttgcccatcgcagtggggtgatcaacgtaggcgagcattgggatgtcgttggggccatcaccaaaggcataggttggaatgccggctaaaccttgtgattcgattaagcgttgaatcccggtttgtttcgaaccaccgaattcgacggtatcaattgaataaggcccgttgcggtagaaggttaagtcttggtttaacgggttggtgtaagctaaatcgttttgtttggtgaggatcaataacatgtagattggattatttaaatagtagtcagcgtcaaccgttggaactggcgcattgacgaaatcgtaagcttcttgcgtcgtggttgtgacgttggtaatccgaatctctttttcatcgtaaaaagcaattgcttcatcagcggccttagccgtcgcaacggtttgttgaatcacgtcagtcggaatcgtcccttgatagatgggttgcccttcaaattggatgtagctcccgtttaacgtaatgaaagaatcaatgccggttttcgctaaggcgtctttgatttcaattggtgaacggcccgttgagataatcggtaaatactgatttgcacgcaattggcgaaccgcgattgcgacggcttcgtcaaccgtcgattgttcgttgtaaagtgtgccatctaaatcaaaaaatacaagtcctttataagtcaaaataaatagcctcctaatgtaatgggtatctaaatatgctagcatgcttatcagagggatgcaaactggaatcggcaattcttaaaatttatggactattttgtgaagattattaattatacggtataatatagttataacttgaaagagaaggaattcaaatgaaaatattaatggttgaggataataaatccgtatcagaaatgatgagcatgttcttcttaaaggaacaatgggatgctcatttcgcatacgatggtaacgaagccgttgaacagtttagtgctgatccaatgagttgggatatcattacgttagatttgaatttaccgggtcttgatggcatgcaagtcgctcaaaagattcgccaactgtctaaaacggtgccgattattatgttgacggcgcgcgattcggaaagtgatcaagtcttagggctcgaattaggtgccgacgattacgtcacgaagccgtttagtccgattacgttaattgcgcggattaaggcgttgcaccgtcgcgccgaattggtcgaagaacagattgaagctgatgaacaggttgaagaagctgctaacagtgattatgatgttcaaaccgatcactttaagatgagttctaaaacgcgtgaagcgtatctgtttgatgaacccgtcttagatttaacgccgaaagaatttgatttattaaaaacactcgctaaaaatccgcggcaggtcttttcccgcgaacaactcctagaattggtttgggactatcaatattttggtgatgaacggacagtcgatgcccacatcaaaaaacttcgccaaaaaattgaaaaggttggtccccaagtcatccaaaccgtctggggcgttggttacaaatttgatgattctgaagtgaaacgttaatgaaattaatttatcaatggatgctggccttttttggggtgattatgacgaccattgtgattgttgggattgcttttacgcaatattcaacgaaaacggcctacaataacacttgggaccaactggaagggtacgcatcggtcattgaacgtgaagcctttaaacaggggtcacaagcaactttgtcgaagcaatttattgatgacggacgcgcgattttgtcgcaacaacacgtcagctttaatttcttcaatgcccaaaatgaaatggtttatccgacaccggacgccaatgtttcggtcaagaagaagtattggaaacaccttaagaacggacaagtccaacgtttaagtatgagtagtgatgcccgtcaatttaatacgacccaggaacaactggtggtctttaaaccggttttctacaataataagttgatttacgtgattggggtcgcgtcctcattacagaatgtcaaatctagtctagtgacgatgcgtaaaaatctattgattgcctttttactgtcaaccatcggtgggattttactcagttatattctggctcgttatcaaatttcacgaattaatcggttgcggaacgcgactcatttggttgctgaaggggactttgacgtccaaattgaaaatccgggtaaggacgaattagatgatttagccactgattttaatgaaatggtgcaatcgttgaatgaatccgaagtcgagattaagcgccaagaagatcgacgtcgtcagtttatggccgacgccgcccatgaaatgcggacgccgttaacgacggtcaagggcttattggaaggattgcaatatgacgcgattcctgaagaaatgcgtgagaagagtattacgttgatgcaaaatgaaaccaaccgtttaattcgcttagtcaatgaaaatttagattatgaaaagattcgcaccaaccaaattaaattgaatcaacaacgctttgatgcagtggatgctttgcagaatattcaggaacaattacagaaaaaagccgctgaatcaggcgatgcgttagtgattgacgcgcctgaaaaagtgccaatctacgcggattatgaccgctttgtgcaagtcatgtttaacatcattcaaaatgcgattcagtttacaacggatggtcagattaccattacggcgaaagaaggtttccacgaaaccatcctaaccgttagtgataccgggattggcatgacagatgaacaattaaagaatatttgggaacgttactacaaggccgatccttcccgcaaaaatacgaaatacggggaatccggtttagggttagcgattgttcaccaactcgtccaactgcataaagggacgattgaggttcaaagccagccagatcaagggacgacgtttacgttaacttttccagatgaaatgattgaagaagaacaataaaaagccaatgtcaattcctgagaatggtttaagtatgctatcctaaaagtaaacgatgactcatttgagggggataatcatggctaatgatgatttaaaattagatcaaaaagaattcgcaaagatgattgctagttcacatcaagtttcggacgaactcgatccagaaaccattgtcaaacgtaaattgaccatttatttaacggcctattatttagccgaaaagtttaatgacttgcaagcacaatcattaaatggtgaaaagccgagtaatcaagactatcaacagctgttaaaacaattacaagaaactaaatttggtgattggtgaacatctattcaagcatccaactgataaaccagttgggtgttttttgttggattgcaaaaacaagccatgacagaactcaattgatgagttttggcgcgcgtcgaagcataatattcagttaatatcagaatgctaagacctatagtctcttttttgtaagccaacaaaaaagtgttcttttgacgtcttttttggttcaagcgattgaaaatgacggtgagtcttagtatgcttagcactaacaatgcgttttagacgaggaggattccaaaatgacggtcgattatttaatagaagatgctattcgccaatcactaactttgtttcaggaaatcaccattaagtcggtggttgattcgacgaatcaaatcgcaaaagaaagcttgcagcaggaacaatcaacgcctagcgtgattattgccgaccaacagacagcgggctacgggcgcttaacgcgcacgttttattcgccttcagagacggggatctatatgagtattgcgctaccaatgacgttagatgaggaaacaacgttattgacccccatgagtgccgtggccgtcaatcgggcaatcaaaaaagtttgtcagattgatactcagattaaatgggtcaatgatctttattatcaaggcaaaaaagtcgttggtatattagcagaatcaatcattaaccggggtgtcgtgattggaattggaatcaattttaaggctgattcgcaattacagaggactgttcaaaaggcgggcgctttgttacctgatgataggttagtgacgcgcaatcagttgattaatcaaatcttaattgaatttgaacggctattaccaatttatcagcagaaacaattcatggatgaataccggcagcattcattattattgaataaaaacgtcattttacgcttgaatgaacagacgactattgagggtcgagtagcaggcattagtgataagggcgagttaattttattaaaagccaatcagcagttacaaaggtttaatgctggtgagattgagcgggtgttagcatggtaaatcataaacgattagtgggcctgattatcagcgcacaaatggccgtcctattggcgattagtgcgcaattaacgattccaatcgcatttgtgccattgacgttgcaaacattgatggttgggattattgcaacgttgctaccgtttaagttatcaggtattagtatcgcaatttaccaatttctagggttagtgggattcccagtcttttccggtgggcagacggggattgcggttattttgggccccactggcggttatatttggggattctatgggtattgttggctagtccattggttgttagcgaatagattgcagccaagattgagcattattttagggattaataccgtcgctagtttaggtcaattattgattggcaccgcgtggttaacggtcggacagcatctgagtctcgaacaagggctgttagccggtttgctaccgtttattatcccagcgctgttaaaaattttaatcgtcggcttgattagtcagcctttattgcagtttactaatcggtatgcttggtaggaaaaccagtgatgactttagtgaagcgtcaacaagatattcttgttggcgttttttttgaattggtttttaagtgttcttccttttaaaagcgctttcaaaagaacttccgacaagctatgataatgacaggaattccaaatatcaattaaaaaataaagtaaagaaggttaagaaatgctactaacaattattgcgtatgccatgattattgtctttatgtacatcattatgaagaaaaaaatgtcaccttttacagcattagttattattccattaatctttgccattatcgctatgttaacaggggtcgctaaaaaagggagtttaggcgactttgtattagagggaatcaaaaccaccgctaatacggggattatgttattatttgcgattttgtatttctcaattatgttagatgccggattgtttgatccaatcactaagaagatgatctattttgccaaaggtgatccgatgaaggtcttgattgctaccgcagtcgttgcagccaccgtttcgttgaatggtgatgggaccacgacgaccttgatttgttgttcagcttttattccaatctataaaaaattaaatatgaaactcatgaatttaggcgtgttagttattttacagaatacaattatgaacttactgccatggggtggtccaacggccagagctatggccgttttaaacgtcgatgcgagtattttagcctatctattaccagggatgattttggcgctcgcttacgtgattttctacgtggccccacacatgggacgacaagaacgtaaacgtttaggggttaaaaaattaaccgatgcagaaatcgaagaaatgacagccgttactgatcctgaagttcaaaaaatgagacgaccacaaaattttgcttttaatggtttattgacgattttattgattgcttggttagttgctggttcattcattcccgccatcgaaatgccaccactcttattattcttggtcgggacttgtattgccttgatggttaattacccatcattaaaggatcaatcaaaacgaattggtgaaaatggcggtgacgccgttcaagttgttattcttgtttttgctgccggcgtcttcatgggccttttccaaggaaccgggatggcagaagcattagcgcatagttttacacaaattattccgcaccaattggccggtttctggggcttagtgattgccgccatttccgcaccaggcgcgttctttatttcaaatgacggtttctactttggtgtattgcccgttttagcgcaagctggtcgcgcatacgggttcaccaatatgcaaatggcgttagcatcattgatgggtcaagcattccatctattaagtccattagtggcattcatctatctactactccgtttgaccggtttagacatggggcaatggcaaaaagaagccgctaaatacgcattaggcgtctttgtaatttttgttgttacgattattttatcaggccacatgccactctatattccgcaataaaaatgagacaggaaaagaacaatctagtgttcaaaagaggcttatagtaagaagcggggtgataaagggatgtttaatttatttaaaaaacgaacgcaagaagtggcaccgccaattgttaaagaacaagtggttgaacagtggcaggctgtaccacagtatgtcgcagttgatccgcgagattatccacaagtcaccgtcattgctgcgagccttgcgagcggttctgcaacgaatagtcagttcaacttgaaacgactattgattgctaatccagaagcgaaacgggtggggatcattgtgagcagtttgatggcgacacaaacccaacaacaatatgtgattcgatccattaaaaaaagagtgaatggagaatagagatgctaagaaaattcaaaattacaatcgacggtcaagaatatttagtcgaaatggaagaaattgggggcacgccggtaccaaccgggacgccgaacgttgtgccaactagcgcaccagtcgcaccagttgctgaagtcgctacacctgcaccaacgccagcggcacccgtagccgttactgctgatacgatgatggcaccaatgccaggaacggtgctcaagttattagtcgctgaaggtgaacaagtcactgaaaatcaaccattactgattttagaagcgatgaagatggaaaatgaaattgttgccgataaggcgggaaccgtcggtcagatttttgttgatcggaatcaagcaatcaatgcaggcgatgcattaattagcattcaataggggggcttagcgtggaaaccttaattcaagggattacaagtatttcaatgggccaaatcgtgatgatgctaattggctgtttgttaatgtatttagggattaaaaaagaatatgaaccgacattattagtaccgatggggttagggacgttgttagtcaatttccctggcagtggggtcttaacccaagtcgtggggacgactaagacggaaggggtcttagacgttttatttaacgctgggattaatacggagctcttcccattactgatttttatcgggatcggcgcgatgattgatttcggtccgctattacaaaatccattcatgcttttattcggggcagctgctcaatttgggattttctttaccgtcattattgccgtactgtttggttttgatatcaaagaagcggcttcaatcgggattatcggcgctgccgatggtccaaccgccatcttcgtttccaatcaactagcacccaagttactaggggcgattaccgtcgccgcgtattcctacatggcgttagtaccaatcattcaaccgttggcgattaaagccgtgacgactaaaaaagaacgtcagattagaatgacttataaatctgaaaatgtttcaaaaacaactaagatcgttttcccaattattattacggtattggccgggtttattgcgccaatttcgttaccgttagttgggttcctaatgtttggcaatctgttacgtgaatgtggggtactcgatcgactatccgcaactgctcaaaacgaactggtgaacatcgtcagtattctgttaggactaacgatttcagttaaaatgcaagcggatctatttttaaacgtgcaaaccttaatgattatcgcttttggattagttgcgttcattatggattcagttggtggcgtgttgtttgccaaattgttgaatgtattccgtaaagagaaaattaatccaatgattggggctgctggtatttcagcttttccgatgtcgagtcgtgtgattcaaaaaatggcttctgaagaagaccctaagaattttgtattgatgtacgcagttggtgcgaacgtttccggtcaaattgcgtcagtcattgccggtggcttactattatcgttttttagttaaaggaggacctgtaagatgtggactaatttagaaacagctttcgagttaatgctcttcgggatgggcggcgtctttttagtactattcgtgctcttcttgacggctaagctattgatcaaatttttaccggtgaaataagcgatgatgcttaaaagaatctggttagggctgaatcaaactgaaacgcaacaatggcaagccttattagaacaagccggattagcagttgattggcaggttgattatacgattgggttattcgaaaataaacaattaatcgcaaccggttcggtgtatgccaatattatcaaatgcgtggctgtcagcaatcagcaacaatcgcaaaacttgttaacgcaagtcgtgcaggcgttattagatgatttagaagcgaatcaacaaacgcatagtttcgtttatacgaaaccgggcacggctgattattttacggcgctggggtttaaagccattgtcacaaccaaacaagtgattgtcctagagcgaggtttccctaatttaaatgattaccggcaacaattacggcaggccaaacaggccggtcaacgaatcggggcaattgtgctgaatgccaatccgttaacaatcgggcacgaacatttgattcagacagcggtccaagcgagtgatcacctctatctctttgtcgtttcagaagagcgctcgttattttctgcgcaagaacgattggcgatggttcaacaaatcgcgaataaatatacgaacgtcactgtgttacccacgaatcaatatcttgtttctagcatgacgtttccaaactactttttaaaagatcgtgctgatcaaaacctagcgcgcgtgcaagccgaggtggatgcgacgttatttgcgaaagtcatcgcaccagaattggcgattacaacgcgctgggtgggtgaagaaccattatcaccagttacggcaatctataatcaacaaatggcacacgtttttgggacagcgattcaattacagattatgccgcgacttgcaatcgcgggtcaagttgtcagcgcaaccagagttcgaacggcgattaaggcccaggattggtcgcaagtcgcgcaattagtcccaaaagagatttatccaattgtgaaaggaagtatcgatgatggaattaaaacaaatcgcaacggccggcaccatggaatctagtgatttaatgattacattaagtcctaatgaaacgggtttggtcattgacttgcaaagtaatgttgaaaaacaatttggccaacatattcgggcgttaatcacagaaatgttgacgaaatttaacttaacgaatgtcactgtgagcgctgttgataaaggcgctttggattgtacgattaaagcgagaaccgtcgttgcaatctaccggggtcttggtaagactgattatgattggaaggagatcaacgcatggatcgcttaagaagaacgatgatgtttgtgccaggggctaatccagccatgttacgggatgcaattttgtacggtgccgactcaattatgtttgatttagaagacgctgtttcgatgaaggaaaaggattcagcgcggatgttggtctatagcgcactaaaaacatttgactaccgtagcgttgaaacagttgtccgaatcaacgaactcaatagtggtggcaaacaagatattgaagcgatgattttgggtggcatcaatgtgattcgtttacctaaaaccgaaactgctgaagatattaaagccgttgatgccacgattaccgaagtggagacgcgttatcaattgccaatcggcactactaaaatgatggccgcgattgaatctgcagaaggggtattgaacgcccgcgaaattgcgaccgcctctaatcggatgattgggattgccctaggtgctgaagactatgtgacgagtcaaaagacccgccgttatccggatggacaagaactattctttgctcgaaattatattctacatgccgctcgggctgccgggattgcagccattgataccgtctattcagatgttgacaatgaagccggtttaaaacgagaagccgccttaattaaacagttagggtttgacggaaaatcagtgattaatccgcgccaaattccgattattaatgcgatttatgcgccaactgaatcagaaattcaaaatgctaaagaagttttagccgcgattcaagaagccgaagccaaagggtcaggtgtgattgcgattaacggtaaaatggtcgataaaccaattgttgaacgcgcctatcgcgtactcgcaatggcgaaggctgctaatatggaggtcgaataatggttgttaataaagtgggccgtgagattcctaaacaatatgcagatcaatatggcgtctatgctggtgaagaagcgaatcttgccgattatcaactggcgaccaaacaagttcatccggttaaacctcgcgataataaacaattagcgtccattcatgacgcgattgtgcaaacgggtttaaaagatgggatgacgatttcgttccatcatcattttagagaaggcgactatgtgatgaacatggttttagctgaaattgcacgaatgggcattaagaatatttcgattgcgcctagctcgattgctaacgttcatgcacctttgattgattatattaaacaaggcgttgtgaccaacattacctcaagtgggttgcgcgataaagtcggggctgccatttcagaaggcatcttagcgaatccagtcgtcattcggtcacacggtggccgggcaagagcgattgtccggggtgatattcatattgatgttgcttttctaggtgcacctagttcagatgaatacggtaatgtgaatgggaccaagggcaaagcgacttgtggatccctgggttatgcgatggttgatgcgcaatatgccgatcaagtcgtcgtcattacggatagtttagtgccatatccgaatacaccaatcagtattccgcaaacgttagtcgattatgtggtcgtggttgatgcaatcggtgatccagaagggattgctaaaggggcaacccgattcaccaaaaatcctaaagagttattaattgctgaatacgccgctaaaatgattacgggttccgcttattttaagaatggtttctcattccaaaccgggaccggtggcgccgcattagcagttacccgtttcttgaaagaagcgatgattgaaaataatattaaggccagtttcgtattaggcggaattaccaatgccatggctgacttattgacagatggtttggttgaaaaaattattgatgtgcaagattttgaccatccttcagcgatttcgttagggaataatcctgatcactatgagattgatgcgaatatgtatgcctcaccgttaagcaaaggggctgtgattaaccagctagacgttgcaatattatcggccttagaagtggataccgattttaatgtcaatgtgattaccggttctgacggcgttttaagaggggcttccggtggacattcggacactagtgccgcttgtaaaatgagtatggtgattgcccccgttgttcggggtagaatcccaacgattgtggatcaggtcacgacagttgtgacaccaggcagcagtgttgatgtcgtggtgactgaattaggggttgccattaatccacaacgaactgatttaattgacatgtttaaagcgagtcgaattccccaagtcacgattgaagaattgaagacgaaagcttaccaaattactggcgaacccgcaccaatccaatatggtgatcagacggttgcgttgattgaatatcgggatggcacgctaatcgatgtggtcaaaaatgtctgaattaagctatttgacggggccggaaattacgttagtcgagatgctaagtgcacgagaacaaagagtcatgacgcaacaaacattattaaaacggcatccagagatgacgctagtcaccgcgactttaagaattccgggacccattaaaacaagtgttagcctgcaagcattgatgactcaattgaagggtcagttgcaaaccaattatcaagttgaattggtcgaacaaaggactaatttaacggccatcacgggacccgagttatattttgtgctggctaaagatgctcagttagtcaaacaagaaatgatatcactcgaagcccaaccgggtttttatcaattatgtgatttggatgttttgattgatgaagcgggtgaattaaggcaagttaaccgcgagcgtctcaagttagctagacggcaatgtttggtttgtgggcaagacgccaaagtttgtagtcgttcgcgccaacatggtttgtcagaagttcaaacagtgattgacggtattattgaagaggaggtgctagccaatgaataatcaaaaagtagctattacggaaaccgtgctacgtgatggtcagcaaagtttaattgccactagaatgccgattgcagatatgctccccattttgaagacgatggatcaagtcggctatcacgctttagaagtttggggtggggccacgtttgatgcttgtattcgctatttaaacgaggatccgtgggaacgattacgccaaatccgtaaacaagcaccccatactaaattacaaatgctattacggggtcaaaatatcttaggttacaaaaattatgcggatgacgttgtgacggcgtttattcaacaatcaattgcgaatgggattgacattattcgtctgtttgatgcgctgaacgacacccgtaatttaaaaaccgcattaaacgcgactaagcaatacggtggacatgcacaaatgacgatcgcgtatacgacgagtgattaccatacggttgattactatgttactttggccaaagaaatggctgatatgggcgctgattcgctttgcattaaggatatggcggggattttaacgccacaaacggcttatgagctagtgtctagaattaaagcagcgattgaaatcccgcttgaggtgcatactcatgcgactagcgggattgctgaaatgacttatttaaaggccatcgaagcgggggcggatatcattgataccgcgatttcaccttttgcgggtgggactagtcaacccgccacggaatccatgcagattgcattgcaaaatttaggttatacggtcgatttagatcaaactaaattaaatgcaattgcggattattttgcgccgattcgggatcgttttcgacaggacggcttgttgaatcctaaagtcaaagatgttcaacctaaagcgcttgtttaccaagttccaggtggcatgttatcgaatctattggcgcaactacaagcgcagaatttagaatcggcgtacagtgatgtgctggaagaaattcctaaggtgcgagcagatttaggttatccgccattagtgaccccgctttcgcagatggttgggacgcaagcgctaatgaatatcattagtggcgaacgttatcaaattattccaaatgagattaaggattacgtcaagggcctctatggtcggccaccagtgccgattcaagcggcaatcattaccaaaattatcggggatcaacaaccgattacgcaacggccggcagacttattagcacctcaattgcctgattttgaaaaggccagccaaccttacgctaaagggattgaggacgtactaatgtacgcgctattccctgaacaggcgcgtgattttcaaggccgacgtgaggaccgtttctatgatgtgccggttcaaaccgtcgaagtggctttaacgccagagttttaagaggtcaaaaaataaaaaatttaatagtcagccactaatctggctgactatttggtataattgtgcaaaatgactgaaggggtgttttgcatgaatttagtagtgagcgcagtggctaaaaatctagatttatcacaaaatcaaccaatcaaagaattagtatacgaagcttttcggaaaacgattatcttgggggatattccagccggtgaacggattaatgaaaagaacttttccgaatcaatgaatattagtcgtacgccaattcgctatgctttaagacgtttagcagatgaggaattagtgattcgaaaaccgggtgttggtgtgattgttaaagggatttcaatcaaggatgcctatgaaatttatgccattcgcaaagaattagacgcgttagcaacgcgacaagcgatgctcatcatgaccgatgcggattttaaagccttacatcaactattattgacgacgaatcaattaaatgaagttaacgatgtggacgccgtcttaagaaagttctcagagtttaatcagatgatttatgataaaagtcaaatgtatcggttgaaatcaatcgtgacgaaattgcaagaatatttaatatattttagagatatttgtattaaagataaaagccgtcgagattctgcacttcaagaacattggttattgtatcgggggatggttaatcaggatattgaccagattaatttaattacacacgagcatttagaccattcgttggaatttatcgttaaagagatgagggaacatcaccttgaatgaccaattacgacaaacagcacaaattgcacggcaatcattaatcgaagaggtgacgctagcgcccaagccggggttagtcgatccagtctcagtgggtgcacatactgatatggatcatcaactatttctaaccagtattgaagcactcagtccgtatttagaacagtatattaatctcggttatacgagtcagtctgaccaacaattatttgctgaattacggacggttgggcaacaagctgaacaggcgatgttgactgcaactcaccaggttaacacccataagggggctaatttttcgtatgcgttcatattaggggcactaggcagggcctaccagcaatggtcactaacccagttgattacagcagagtttgcgccagtttttgagattattcaggggatgacaaccggtttagtgtcgcgtgattttcagaatttggcgaccaaaacgaagctgagctacggggaacaattgtacgttgattacggcttaacgggtattcgtggtgaagcagaagccggctatcctagcttaaggttgctggttttaccaatgttaagaggctcatcaactaaattaaatgaaaaccaacgattgcagttgatgttaaagttaatggccaacgttcaggatatgaatttaatccatcgtggtgggattgaagcttggcaacaggttaaagcgactgcgacaaacttattgacgcaagattttccaactgatcttagttttaaacaagcgttacaactttttgaccaacaattaatcaaaaaaaatctaagcccaggcgggacagctgatttattggcattgggaattttctttgatttattaaaccagagtcattagtcaagaatagcttaaaggcgttagcaatccgaattaatgggattgctaacgcctttttgatttggtgacatttaactgaccacttgatcctgaaagtttttaaaaatggtttgttgattggtggttagaatcagaacaatcgcgtattgttcagcgatttgtttcaggtcgactaataattggcgagccgttgtcggagtcaattcgtcgagataatcagctagaatgaacaattgatggtggcccaataaaccgcggaccagttgaatccataattgttgaatcggttttaattgtgcgccgggggttgttttgaagtgtttaatgtgttgattaatgagcgattcaaaaggttttagatcttgatgtggtttcatcaaaaggttatcccaaccggttaggaagggaatgattttaggatgctgataatcaatgatatagggtttttcaggggtctgaaaagtggcactgtgtacatcagcagtggttgcgaagtagagtttaccagtttctaagggttgtttatttaacatttaaatcacatcccgatgttgtttttgtttagtatggtgaatcatgattatgatgacgccgattaccgggattagcaaggctaatcctggttgccagacttggcgtaagactttgttggatagtgtttgtttagcgctgtcgtggagcactggattaattaaggaatcactactgaaatcggttagatgattcttgaagagggggttaaaagcgtttggttgccgttgaacggtttgcagggggcgttgtagaaaatgttggttgacggcttccaaaaactgccaatattgatcattgaataaagcgccgaggataataatcgtcagtagggcgagtgcgatgactaataacgctgtcataaaataataactgctaattttaacggtcgaccagttggcactaataaaagttaacatatcttgttttaaccattttaaaagataataactgaaaaagagggcgcagcagacgccgattaggagtagcgaccaatagattaattgataggttttaatcaaatctaaattagcgtggagtagcttggttaataattgattagcggaataacgcgcttcggaggagaaattggcgagttgggttttcaattgacttaaattgtgttggcctaaactaatcagaccgagcagtaagccaatgataccaaagaaaaagcagttaaataaataaagactgagcgcgctttttcgataatagtgaatattcgccaaaatagatttgatgaaaaacatgctgccacctcctgatattctctagtttaaagcctaagtgtgaaaaaaatatgaactatgtggtaaaaattagagtgcaactcaccacgggagattccgagcattagcctaggccggtgaataaagacgggttaggctttgtttgccggacgtcgctaagcgtaagaatctgtggtgagaggcacgttttgattagagtgcaactcactacgggagattccgagcatcaaaaaaagcgccgcgtcatccgttaattggatgatgcgacgcttggtttaattggaactactgctgtcactgttgctgttgctttctttgagcgctttgctctttggtacttcggttaaatctgatttatccgtggcgagttcaggggcatccgttttgaaaagattcgcggttgtctgattaccattctgagagaaaaggctcgttgatttagtgccgagttgattcttaatatcaatcaattgttgataacccgattgataattaaaattactaggatcaacgggtttgaacccatcaggtgtgtagaaacgcaataagttcttttcgttgacgtcatcggataagctcaactcatgggtgacttgtttttgccaagtggcgacttgtttttttagtttggcagatggtaaagtcacttcggtgccatcgctattcttataaatcgtcccatctaaaacggtgtagtcaggggtgacaaagttatgattccggaaagcgacgacttgatcgtggtcgctcgacattaagtcggttccgaattgaatataattggtcgtatcaacccctagaagatgcagaatcgttggtaatgcatcaatttcaccaccatattgggtttgaatcccacctttgaggcccttcatattgatcatgaacggtacccgttggagttgcgcattgtcgtaatcgccccaagtgtcgggatcacgaccgagaacgctcaatagggatttattatccgaattagataagccgtagtgatcaccatatagaacaatcattgagttatcgtaaaggccggaagacttcagataatcaaagaattcttccaaggattgatcgagatagtgggcggtcgcgaaatagttattgacggccgtattctcggttgttgcgcgcgggaagtcaccgtctttttccggtaatgggaatggaaaatgattggtgacggtaatgaacttcgcatagaacggttgttgcatttgttcgagatatttaatcgattcgccgaacaataatttatcctttaagccgtattgtaaaacgttgtcgggactggtgttaaagtaactagaatcaaagaaataattgtaaccgaaatttttatagacgttgttccggttccagaagctaccgacattgccgtggaaaacggcgctggtataatcaccattttgtttcagaatagaaggtgctgcttggaaggtgttgtccgaacctaaggtggtaaagaccgacccttgagggagtccgtagacactggtttccatcatattttcggcatcactggtcttgccttggccgacttgatggaagaagttgctaaaacttaacgtattttgatcatgataaagactatttaaaaacggtgtgacttcttgaccttcgaacttataatcaatcaagaattgttggaaactttccaaatgaatgacaatcacatttttacctttagcgaccccctcgtagctagcgttaggggcggcataatgttctttaataaagtttttaaccggttctaaatcgtaactttcagcttgtgcgcgcacttggttgttttgcgtggttttaactgcatcgtaaacggtgaacgtatcgatgcccaaatatttaacgatgtaattgcggtcaaacgttcgtgataggagttggggccgatccatttcgctgatacttaagttaatcccgaacagtaagacggcgattgaggtgatactgaacgcccagcgtttcgagaagcgccgttggtcgattttaatgactttgaataataataataaggccaagatgataatatcaagccaataaagcgcatcgtgccaactcatcagcgctagcgaacttttgctgagtcccgcggaaactttcgaatagcctagaatcgtattaatcgtcatgtaatcggtgaattgacggtaatagatgacgttaaaataaagtaacgcggtgttagcgccgtaaatgattagcccaacccagtaactcagatggggttgacgaatatagaggagaatcccaattaccagaagcgttgtcgaaaatgggttacagattagaattaacgtctgcagcagattgctggaggccagattaaaatcggtaaaatatgcgaagagggttttaatccaaaataaaaagactagtaacgttaagaagcctaatttagtcgctagaaattgtttgatttttgcaagtttcaagaagcgtaacatcctttccaggaaagacgaatataaagataaagtaatcaatattgctctattttaccgcgcggcgcgggtgagcgcaaaccaactcggcagtttaaatagaaacttaaagttttctaaagctaattagtcgcgttttgaaaagagttgcgtgtaacgtggattcggtttttcgggggttaaaacgtgttgatagacggcctgtaactcatgaccaatctcagtgatactctttgattcggcggtttgataaccttgttttgtcaaatcaggaactgattgttcaacaattgcgcgaattaaggccgtgaattcagcgttgtcgcggcccatgtaacagttctgacgatccgttaaccaaccttgataaactgggatatcacgaactaagacgttttgatgactcgcgagtgcttctaagacgacaatcccttcagtttcttcataagatgggaagaagaagagatcagcaccggtataagcgccttttaaaacgtcacctttaatgtagccagggaatatgacgtttgccgaatgatcggtttgaacaatcttacggatgttgcgtggaatgctatataacgggacatcgccaaaccaaataaaggtatagtcaggcatgtgacgcgcaacttcgacaaaatccaatagtcctttgcgtttgaagaagagaccgacgcaaatcacgactttttgatctggttttaaattgaaataatcacggaaagccgcttcgcgttttgtgactggttgatagttcgctaaatcaatgccgtttgagatcggcgcaatcggcacggttaaaccatattgtaataggagttgtttcgcgtatggcgtgggggtaatcaggtgatcagctcggcgataaaggctcactaagtatttcttaacaaatggggcgagttgattagaaccgatgaatgagtttttgaaatcttcttcagttgaatgggcgtgataaatcacgggtttatgcaactgacgagcgcggcgaatcatgcgccgactattgagaccataggtgttaatatgtaaaatatcataattgtcatctttagcatctaacgtaaattcaatgcccatttcagttagtgcgcgtttttggtggtccaatgcccgaccaatgccggacttggctaatagtttttcgctttcgaagtacaatagaactttcatgttggcactcccttagaacgtattaggattattatagcatagctgatttagaatctgttcgggctaaagtcgggcaaaacgggtcaatttttaagattcggtatagttctaatctaaatccgttacttaggcacgtaaaatggttataatgaatttaaagaatgaaacttaatgaacataaaatgcaggttagtttagatagtgaggttagcggttgttatttttaggtggtttttatcaacaaattattttgccctgggcgcagcagtttaatcatttgccgttagtgaagttaatggttgaaagtctcgataagacaattttatattgtctgatatatttagcgtgtcggctagtgtattgtctagtgaaacaccggtcaactagtatccgcgaagagctacaccggtttgtctttgtcttttatgtctgtttactagtatcgttgaccgttttacggcatatttattatccatggcaactgcaactctacgttaatcgcccgttaagtcagatcaatttaacaccttttgttgaaacccttaaattgagacaagcaccggcccaactggattactggtataacttatatggtaatattttatggtttatcccgtttggttggttaaaatcaggcttagccaaaaaaacgcattctgcttttaaagtcatctgccaaggggccttattatcgttaggcatcgaatccgcccaattcattttaggaactggattggccgacatcgatgatttaatttttaatacgataggtgcaattatcggtgttattttatatcagagcgttaatcgtctgaaaaagcgataaatcaagtgggtttatcgtttttttttgaaaaaaatttaagttagacgtcatttatatgtaatcgccatcatagtcgatgctattggattctgattggtataccggttcgaaaccgcttcaatggtgccgttttcgtactagaaattctaaaaaaatgtctgtataatggatttttgtactttaagagaagaagaggaatttagatatggctattttaattgcattaatccccgcagttgcatgggggagtatcggattattaagtggtaaattaggtggcaatgcttatcaacaaactttagggatgacaattggtgcgctggtttttggaatcggtacctttttattcctacatcccgttttagatgctaaaacaatgattgtcgggattatttcagggctcttctggagtgtcggtcaaggccaacaattccaatcgatgcaagccatgggcgtttctaaaaccgtacccatgtcaactgggatgcagttagttgtcaatacattagctggtgctttattgttccacgaatggaaaacaacccatgattttatctttgggatttttgcgttagtgattttaattgccggtgccactttaacgtcaatgaaagatcctaagagtaatttggctgctaaagaagacacacaattggcccgtggttttagagcattgctcatatcaacggctggttatggtggttacacgattatcgttaattgggctcacgttggcgcaactgcgattgtcttcccacaagcaattgggatgtttatcggggctttagtctttgctttctttggcattggtaaagcggtttacagtaagaaaacagtacttaacattagtactggtttgttatggggtttaggtaatttattcatgttgatttcaatgagtgatattggcttagccatcagttattcattgtcacaatgtgggatcattatctcaactatcggtagtatcttcttattaggtgaacgtaaaactaaaaaagaaatggtcttcgtcacgattggctgtctattagtcatcgtgggtggggtcacattaggtatgatgaaataattcgcgctatgagagaacgcgattatcaattgcatatcaatttaaaaagcgatttatcctgaatttgaaggataaatcgctttttgattgggtttaaattattttgcgtcgggcgtgttcgacaaacttgaacttatccgaacgatggaccgattcagtgaactgtaacaacgtgttgtcctgcagatgagtctcgcttttgacaatcacgacggagctgccagacgcgatgtgtagaatcgcttgttgttcttcggttgctggggcgaccgtgacttctttactggcgtaaccaatctctaaatgttgttggttttcgaaataatcgtataaggaattagccgcgacggtctcggtaatggtggggaccaccgcttgaacaacgtaatcattatcgatgactaagggttcgccatcgacaattcgcagccgttgaatataagttgcggggattatttcggtcgtgtctaagttaaatttagtttgcggcaccgttgtcgttgaaagtttgaggacccgcgtttcggttttcatatcgaataattcatctaattcgtggtaactcgttaaaccagaaatcggaaaggcgtaacgatcaaaggttaaaacaattgatcctttccctttaatcttatgaataaagccgttttctaataagttagcgagcgctttgcggaccgtttcgcgggaagcaccgtagagttcggtcagctctttttcgctgggaagataggtattggctggataaagttggtgggtaatcttgcgaactaaatcgcgatagatcatttcatgttttttcatcattcgttaaactcctaatatcaataagtctatcatataaattataacggttagatgcaagcgtttgatgacaagtctagacaagttttaaaatattttgtaagcggtaatataaaatgtttgacaacttgtacgtacatgatatatgatgagtttgttaacagaaagcgcttttattaattgcaatcatttattctagggaggtcatgattatggctcaaaaagattattcacaactcgccaaagcaattgtcgctggggtcgggggtcaaggcaacattgatagtttaattcattgtattacacgcttacgtttttatttaaaggacgaaagcttagcacaaaccgaaacgataaaagcgttagacggggtgattaatgttcaaaaaacatccggtcagtatcaagtcgtgattggcaatcaagtgacagcggtctatgatgccgtcattgcggaaattggcgctgagtttgctgatgaagatttaacatcagaaacagtcgcacagacgacgaaacaacaaaatttaacaccgtggggccacgttaaaaatgggtttagtcaattattaggggttatcacgggggcaatgagtccaatcgttggtattttggcagctggtggcattttaaaagggattctagcgattttaaccatgcctcaattgggtgaaatgattagtccaaagagtgaattatacttgttattaaatgcgattggtgatggcgtcttttatttcttaccgattctagtcggctttacagcagcgaaaaaactaaaaggtgatcctgtaatgacggccgtagtcggcgggatattagtccatccaacattggtcgcattgaatggtaaatcattattggaaattggtagtttgaatttcccaatggttaactacacttattcaatttttccaatgattttagcagcgtggttagtcgctcgtttaacgaaatgggttaagggctggttgcctggttatcttcaaatcatctttacaccactaatcgtgatcacgattacggctgtgattactttgtacttaaccggtccagcaatcacatggttgtcaacaggcttagccgcgggtattcaatggttattgctaaagagtggttggctatctggtttattaattggtggtttctatcaagtgctggttatctttggcttacattggggtattttgccattattggccaacgatattgccgcaactggtcacagctacttgaatgcgattttaagtacaacgatggtggcgcaaggggcagcagtcttagctgttgcgattaaaacccgtaaaacggatttaaaagaattatcatttggtggtgcgatttcagctttttgtggggttaccgaaccagctatttacggggtcaatttgaagtttaaacgcgtctttgtttctggtttaattggttcagctgccggtggttttgtcagcggtttgttacacggcaatatgtttggctttgccggttcatggattggttttgcttcattcttagatccgaagaatccaagcgatttatcaaacttatgggttttcttaatcgcatcaacggtcgcaacggttgtgccatttatcgtgacttatgtttggggttacaatgatcaaatgcaagctggcgatggtttggcaaaacctaagaaacccggtaccgttaaataatttttaaagcataggagacgaattaatatggaatggtggcaaaaagcgacggtttatcaaatttatccgcgtagttttcaagattcaaatggtgatgggatcggtgatatcaatgggattattcaacggttagactatttagccaatctagggattgaattaatctggttaacgccaatgtatgtctcacccggtcgcgataacggttatgatattgctgattattatcaaatcgatccgatttatgggacgttggctgattttgaacggttattaaaagcggcccatcaacggggtattaagattatgatggatatggttgtcaaccatacatctgatcaacaccattggttccaagaaagtttaaaatcaaaagataatccgtatcatgattattatttatggcaggaccccgttgacggtcatgaaccgaataactggttgtcgaagtttagtggttccgcttgggaatacgtgccagctttgaatcaatactatttacatctctatgaaaagagtatgcctgatctcaattggcgcaatccgcagttgcgggctgaaatcttcaagatgatgcaattctgggctgatttagggattgatggcctacgtctcgatgtgattaataatatttcgaaggataaagattttccgaatgatagctttaaaacgccaagcgatgatgggcgcaatttctatacgaacggtccccatgtgcatgaatatttacacgagatgtatcaacaaatttttggccctaatcaattcgtaacggttggtgaattatcatcgacgtcgattgacgaagcgctcaaatatacgaaaccagaacgcgaagaattatcgatggccttcacgttccaccacgtcaaagtcgattacacgggtggtaagaagtggaccttgggacactgttatttacccgatttaaaacgggtcttaagcgattggcaaacgggaatggccactggtggcggttggaacgcattgttctggtccaatcatgaccaaccccgcgccatctcacgattcctcaatgatgggcaataccgggatcaatccgctaaattactcgcacttgtggagtttgggttgcaaggtaccccgtatatttatcaaggtgaagaaattgcgatgaagaatgcgtacttcacggatattaagcagtataatgatcgtgaatcgattaatgcttaccatcagatgctcgctgatgggcatactgatgctgaagcgattacgattttacaacaaaaatcacgggaaaattgtcggattccaatgcaatgggatgacagtgttcatcacggtttcacgaccggcacgccgtggttgcaaccggtcttgcacgacgattattcggttactaaagtcatgcaagcaccagacaatgttttcgcgttttatcagactgtgattcgattacgccaaggccaaccattattattaagcggccaataccgattattggcagccgatgatgaagcggtctacacttacgaacgatttgatcaacaacaagtgattcgcgttatggctaatttcactgaccaggttcaagttcgggacgtaccagaagaggtacaaatcttattaggcaactatcctgagcagatgatgaaagatcaaaaaatcaccttgcaaccttacgaagcggtgatgttacgatatacggaagaaggttaagctaatgtttggttttttgaaaaaagaaacgagtgttgaattgaaagcacccactagcggtttgtttgtccctttagcagcagtttccgatgaagtattcgctagtaaggcagttggtgatgggtttgcagtgacaccagcgggaaatgcgaatcaagtggtctcacccattgacggcgtggttagttcgatttttccaacgaaacacgcgattatgttgacgactaaagcgggcgttgaaattctgcttcatttgggcattgatacggttgaattgaacggtgcaccgtttaccatgttggttactgaaggcgccaaggttcaacaaggcacgccactggtgacggtcgattggtcccaagtaatcgcagccgacaaggaaaccactgtgatggtggttagtgccaacgcgacgtttgaattagcagatgccgtgactggtgaagtcagtccagcaacgaccatcgggactttcaagttaatgacagattgaaggggtatttatccaacgaatcattattgaatcggatgacttcggtatcacgaccggagtctccaaagggattctagcagcattgcaacaccaaatcgtgacttgtactaacgcccaagtgacatcggtcgattttagccctagtgttcaactggcgcgccaacaagggattcagcaaatggggcttcatctggtcttagatcgtgatcagccagttagtcggccggatttaattccgacgttgattaagcaagacggtcatttctgggattatgcgacactccaaaaacgggttgcaaaactcaatctgcaagaagttcgacttgaatttcaagcgcagattgaccggtttctggcgagcggtttacaattaacccatttaacctcacaccattttgtgtcgacgttatcaccggcgatttaccagattgtgttagcattagctgaacagtatcgagtgccggtgcgcaatgaatggtgccggttatcgacggcggcacaacgaccgtttgacgagattagtcggcagtttaatgtgacgttgtcgagtcggttaatcatgcatcaacacaccgaaccggtgttaaccgaacgcggcttaacggcgcaattaatagcgacgacggctgaacaggtaccagtcgtgttgacccatatcggttggttatccgctagtttgcgcgctaaaagtagtttgacaaccaatcggttagttgaatggcaaacattagacggtttgaagaagcgtggttattatcaacgccacaaccttgattgtgtgacgtaccaatctttgataaagtaggaggccagtttcttggcgtatcagcatttaacgattttaggggacagtattacggatcggcgtaatcattatgcgactaaatggtattacgattggttagcagaatggcaagccattccgaaggtcactaacttagggctatcggggagcaccattgcaccaccgtacgatccgatggtgcaacgttggcaagcgattcccaccgataccgatttactcttaatctatgcaggggttaatgattttggacgtgatacaccgttaggccagtttggcgatcagacgaccgcaacgttttatggtgcactgagtcaattgttgggtcggattaaacgtcaacgaccaatggccgactgctattttatttcacacgtcatgattggaacgactttctttccggcggttaatcattggggctaccggcaaattgattatgaacaagcgattcaaaaagtgacgacagcatttgcggtggcgcatatcagtttataccaacaccctgagttatcgtttgccaatgccgagcaagctgatcgattaagtctagacacattacatcccaacgatgcgggacatttggcgattgctaaagtgattcagctcgaattagcttagatttaaaaaaacgcgttaaccgtttaatatcggttaacgcgttttttaattagaataattgtccaattccgtagtgaatcgccatggtgatgagtccgattaggatgttgcggatgatggcgacttttactttgccgtcgccgagtttggagctgatgaaggccgtcattgaaacggcgatggtgacggcgataattgtgccggtcattttgtaagcttcaggtagtaaaatcattgcgaccagcgggaagacaccgccgaaagcggccgagaatagtgatgagaaagcggcttcccacggattcatgtaatggccgagttcgagatcgtatttgacgttgacgattgtttcgagcggttttttatgcatcaaatcttgggcaatggctaaagctgtttcggaagtgaccccctttgattcatagaaggcttggacttcttgaatttgatcgtttttagcatttttcaaccgctgttgttcaatcgcgacagcggccttttcagtgtcactttgcgaactcactgaggcgtattcaccggcggccattgaaaaggcacaggctaataaatcagataaaccggcgataaaaatggtgaaattattggtggttgctgccgcaacgctgaagagtacgccaacaacggttaaaatgccatcgttggaacctaatacaccagcgcgtaaggtgttcattttttcttccatggtttgtttctgttttgttttaagtcgcatattaagtcagctttccaatctttagtgggcaaataaggaaccgatggcgtaagtgaccagcatcgtgattaaacctgaaatcacatttcggagaatggctttgggccgattagcatttcctaaaactgccgctgtataaccagtaatcgatagggcaatcatcactgcaataatcgtcccaatgattttgaagtggctgggcagtagaataatcgctagtaatggtagaatagaaccaattggaaacgaaatgagggaagcaactgcggccgcatacggattcgtataggcggttggatcaaaaccgtatttctcgcgaacgaccgttgtcactgcatcggcggacatcatttcggtggacgctttagccgctagttctggggcaatccccgtcttaatgtatttttgacgaacaaaagcgagttgtgagtcataattactggcaagattgagttgtgtattgatgacggcaatttcttgggcgtctttttgcgtactaaccgaaacatattcacccatcgccatcgaaatcgtaccggctaacatgcctgcaatgcctgaaataaagatagcgaagttattgctagtcgcaccagccacgccgatgacaataccggcaacggacagaatgccatcgttagcgcccatgacactagcacgcataatattaattttttgagcaagagagagatgagctgtcatagcagcctccgataatttattttatttaataatcattataaagtagcaacaattctattttaaacaattgatgtcaaaagtcaagttaggacttgccttatagtacactagaaggtatatagtcatcttattgaaatagaaatggtggatgatgataatgagtcgaatattaattttaggggctgcgggacaagtcgcgcagttagtcatcaagcaacttttggcggagcagcaacatcaattggttttatatttacggcatgcggagcgattagcgtctttaacgacgcaaccgcaagttactgtgatcgaaggggacgttaatgattacccacaattggtcaacgcgatgagcaatgtcgatagcgtgtacgctaatctgggtggccagtttgagccaatggttaagaatattgttcgggcgatggctgaaacgaatgtccaacgattgatttatatcagtgggttaggtctttatcatgaagtgcccggagaatttggtcggtggaatgaacaggcggttggccatcaagtcatggaagatacgcgcgatgcagcacgattgattgaaacttcggatttaaactatgcgattttaagatgcgcttatatgactgatgcaccaatcactaattatgaattgacggaaaagggcacggcctttaaagggacgattatttcgcgtcagagtattgcgaccgttgttcaaaaattgattgataatccgaacttgggccaccgtgttagttgggggattaatcaacccaatacggatggtgatcggccccagtattaatagagagtaggttaaaacatggcagaacaacaatataaaattggtgaatttggtaaattagtcgggttatcgacatacacgttacgctattatgaagaacaaggtttgattaaaccgcaccgggatgcaaatgatgtccgttattttacattggaagatgttaagtgggtcggttttattttgcatctgaaagggacgggtatgcgcatcaatgaattaaagctgtacgttcaattacgcgcacagggtgattcgacgattaaacaacgacgggatttattacaaaaaacacgggccgatgcggaagctgaaatggctgaactaaaagcgcatttaaccgtattgagccataagattgattggtatgacggtaaagtcgatcggactattaatgaagatgaaagtttcgaaaattatctacaacgttttgatgattaataaaggagtgatttaaatggcaaaaaaacaaacagctggtcgcgataatttgggtgattttgcgccgaaatttgctgaattaaatgatgatgttttgttcggtgaagtctggtcgcgcgaaacacaattatcagcgcaccaacggagtttaattacgatttcagctttgatttcgggcggcaatttagaacagttacccgcccatttaaaaatcggtaaagccaacaggattactaaagccgaaattgcggaagtcattacccatttagctttttatgtcggttggccaaaagcttggtccgcctttaatctagccaaaacgatatttacagaagattaagtgaatttggacaaaaagaagccatcatccagaatgttaacggatgatggcttctttagatggcactagtcaattagtggtgattgacgaccaatcgataaattaaccgacctaaattaatgagtattaatacgaaaagaacgggcacaatgaataggattaaaaaattaccatctgtaaataatgttggtgaccaccattcaatcagtgttctgaccaaaacaaccagtataatggctgcaagtaaggctttaagttcggatttttgcatcaatagtgacctcatcataatttgtttgttgattaacaatataaacgattgtgtctagcttgtcagaggttcaagaatgatttaattgattcttaattgttggcaagcaaaaaagaggatgcgatataagttttagtatcctaatattaaacgattattgttttgacgcgcgccagaattcatcaatttccgttcaaatcaaaaaccaacctatccttaattcagaataggttggtttttggacttgatactcaattgataacgtgcttctcaagcagccttttccggttaactacgaactgggcatcatgagtaaaaaaatactcataacacccagttctaggttaatcctcaaagcctgaccaacttgagttagcactcaattgataaccgagttctgtcacagcttgttttaaagttcaacaccatgttctttgaataattctgggagactctttaatgattgcgcatcgtatttagcgaagaaatcaggcacactgtaagttttatcggccggacgagaagcgtcaaaactattactgattgattcgattaattcgccatctttaattgttaattcaagatcttcgactggaatactccgtttatcggtaatcttagcgtcgattaagaatggacggcctgctttagtcacttcgagcgctttgtcgaaagcagcagggagttctttagaagaacgaaccgtgatggattcaatccccatgccttttgcgatcatggcaaagtcttggtcttcaatgaaaatcccagagaagtccattggaatatcttcttgttcactcttgataaagtttaatgacgcgtttgaagtgatgatgttgatgattggtaagttgtatttcttttcagtgattaagtcttgcataaccattgaaaaggcaccgtcacccgcaatatggaagacttgacgatctgggaagctgagttgacccgctaaagcaccaggaatccctgaacccattgaagcgaagagggctgaaatcacccatttgttcttaggcgttaagttcaaatgacggaaactgttgataatgttatcaccaacgtcaattgagaagacggcatctggatcggcaatccgattgatttgtttgtagattggttcgaattccaaaggatcagattcgcgatttgataacatatcgaggtattcttgccagttagccatatcagctgcagctgctttgaagaatggacttggggcaacggcttggctgcgatccaaagctttttcaacgaaggtcgtggcgtctgaccagataccgaagtctaagaaatggtggcgaccgaattgagcttcgtcattgtcaatttgaataaatttgaaatcatgtgtgcggtaaattaagttggcaaatgggaagtcagcgccaatcgcaatcactaaatcactaacggccataatttcatcagccgctttagaagccgcccggttagacatgcctaggttaccttcatagctatcgggcactaacccttttgctaaaccggtcatgacaagtggaatttggagtttcttcgataattcgactaacttgtcgccaccgtctttaatcccacggccaacgtgaatgacggggcgtttagcgtctttaaccatcgtcaagaattgatccacttcttcatcagtggcaacagggccagccacttgtttgcgatcagttggtgaacttgagctgtaaggtgtatctggaatttcaacgtaaccaaaatcattaggaatcacgacaaccgcgacaccgttgtgtttgtaggcttcacgaattgctttatcaacaacatatggtaaactttcgggtgtcatcactaagcgattgtaaaccgcaacgtctgcgaacattggattttcggcaaattcttggaagtaattataattcatattgctactagggacttgaccgattaaggctaaaacgggtgcgtggtcttcctttgcatcataaaggccggttaaaaggttagtggcaccggggccagctgaaccaaaagtcacgccgattttaccggttaacttagcgtcagcagcagcggcgagtgcgccaacttgttcgtgacgaatttgaatatatttaagccgatctttttcgatattaagcgcattcattgttgagttgaatgaaccacctgggtaaccaaaaatatggtcaacgccccaagattcgataacgcgaagcatggcgacgcttgctggaattgttttttgtgagtcagtttttgtgttagtcatgataaagaactcctttaggtgtattcactatttaggttgtacacaaccctatagtgttaatttagcacacgttgaaatcgattacaagcaaaacgcttatcaaaagtatggaagattctaattgatatgaatgagattataaggtgataagaagcgactcgttaaaataatttcggcgacctcggtcggtgtttcgggattctcttttaaaagccagtgtttaaaaatattgaatgcgcctaaaatcacaattacttcggcatagtctttggggacttcggttgaataactggcctgggtttgaaaaatatttttaccgcgaataattgtgacaactaattgatagaggcggtcactaaacgtcacatcgacatcggggcgcatcaaactgatgaagagtgggcggtgttggtaggcataggtaattagcttgaaaaagaggttgtacaaatgatcgtgggcttccggcattgtaatttgaggattagcgacttcatcgagattgttttggagcagcgtttggacgccgtcgagaatttcctgttcaatctggtctaataaatcatatttatctaaatagtgtaaataaaaagtcccccgactaatttcagcggtcgtcgtaatgtcagaaacatttaaattggcgaagcctttttcgtttaacaacgtgataaaggcggttcgaattttttggtcagtcagtgctttcttttgtgcgcggtccatcggcagctcctcctgttaaatactgccttcagtatacacgcaatttatcaaaataatcaacacggtgtcaatttaacgattgaatcgtttacatgaacacttttaaataatctgattattgtaaattaaaggggactgtttaaaatgtaaattaacaaagtgttcagtaattgaggaggagcaagatgattaaaacagaatggcaatatctattcaaaaataaaaaaatcttagcaattttaatcggcatgttggcaattccgaccatctatgccgtaattttcttaaaatcgatgtgggacccgtacggacgattggatcaattaccagtcgcggtggtcaatcaagaccaacccgttcaatatcaaaaacacaagatggcgattggttcacaactggcccaaaatttgaagaagagtcagtcgctggattaccattttgtctcggctaaacgggcacaaagtgggattaaatcgggcgactattatatggtcttgacgattccaaaagatttttcgaagaacgccactactttattggccgacaaaccccagaaaatgatgctgaagtatgaaacaacctcggggcgcagttttatttcaggtaagttatcagcgacggccgttgagaaaatgggcaatcagatttctgaacagattaccgagacctacgccaaaacgatgtttgcatagattaaaaggttaggtcaagggatgacccaagccgctagtggcagtcaacaattaactaagggcgcgacacagttaagtgccggcaatactaaaatcaccagtaatctcaatcagttagcggcgagctcgttaacgtttgctaacgggactaaccaatttgatcaaggcttaaaccagtatgttgccggcgttaagacattgagtgatgggacacaaacactgaatagtggcttaattcaacttcaagaaaaagtgacacctttagcgtcaggtacgagccaattacaaaccggcagtcaatcgttgagtaccaggattcaacaatatacgacgggggtccaaactgtcaatcaaaatatgcagacgttaaatacgggggcccaacagttgcaagcagcgaccggcgcattgggtcaagtcgcgcagctggctagtggggcgacaaccttgcaaacgcaaattgggaaagcggcgactaataatcagacgatcaccacgcagttacaaacgattggaactggcattacgcaacaaaacactaatttaacgactgtgcaaaccggcttacaacagttggcgaccaatttgcaacaaaaccagacaacgactcaagccaccacagccagtttgacgacgttagcgactgacttacaagacgttaaaacagcacaaacagcgactcaaaccaaggtccaaacagctgctgaaacgcaacagttaaccagtgcgcaacaagctgcaatcgttgcagccgctcaaccgaatactgagaagcttgaccaagtgatggcccaagtcaaggctttgcaacaaacaacgactgataatgcgcaaacccagacccaagcattagcggcgattaaaggcgcccaacaagcgattagtcagttgcaagcggtcggtggtaatgtaacgcaattagccagcggcagccaaaccgtgacaagtggtttacaacaattgacgactggttctactcaactcgtgacagggttaaaccaagcgcaaagtcaatcggcgcaattaaatgcggccgtcaccaaattagcgacgggcacccaacagttatcggctggaaccacccaacttgccgcgcaaaatgcgacattgaataatggtgcgacccaattggtcagtggcaccacacaattggcaaatagcacgcccagtctaattgcggggattacccagctcacggcaggcagtcaaaaaatgacgacgggcgctcaaaaattagtcagcaacagtgggacgttaaccaccgcgggccaaacactggcgactggtgcgactaagattagccaaggcagtggtcaattggcgactggctctggtcaaatcgggacaggcttacacagtttaacaaccggtaatcaaaaattagccacatccttaggccaagccggcttacaagtcaaaaaaattcacgcgactgatttaacttacgctcaaattgcgaaaccagtcaccactaaacagcacgagcacgataccgtacctaataatggaacggtgatggcgccttacatgatggccgtttcagcctacgttggcgcaatgtcattagggttaatgtacgacatttacacaccacggcgcaaaccaaagagtggtatcagttggtgggccagcaagatgtcagtgcttgcactagaagtgatggcgcaaagtaccttgatgtacgggatgatgatgttgatcaacggtttaaacccagttcatccgggcgcgacttacttagtgatgttgatgactagcttaacctttgtcagcctaatcaatctattaaatctggttttcggtcagattgggtcgttctttgccttgattctattagtcctgcaactaggaggtgctgccgggacgtatccaattcaactatcgaatggtttcttcgaagccattcatccgtacttgccgattacttacgcggtcaatggcctccgcagcggtttaatgattggtgattcagttctgccaagtgtcgcggtgttagcgggtattacagtcgttttatccggtttaacgattgcgttcttctcattgaaacgcaaaaaggtgagcaccatcgaaattgctgaactttagcgattaaaagaaccatcggcccaaattttgagggtcgatggttcttttttagtggagatatttaatcaattcttcagtggttaattgttgtttttcagtagcggcaaaatcggcgattaactgaccacctttcagaattaacaatcggttgccatattgtagtgcatcagctaaatcgtgggtaatcattagacacgtcagcttgttctcccgaatcgtggtatcggtgaaagtcatcaaggcttggctagaaaccgcgtctaaggctgaagtgtgttcatctaatagtagtaactcaggtttttgaatggtggccatcaagaaattcaaggtctgtcgttgaccaccggataaattactaaccggtttgtcgagttgcgcctctagatgattgggcagggtcttcgctaaggcttcgatttgcggacgttgttgtgctagtcgtcgggggaagagccgacgtcgttgaccgcggcgcatcgctagtaggatattttcggcgaccgtcatgtcagcggcggtgcctaattttggatcttgataaacccgactaatcagacgggtgcgctgttgagcagattgtttggtaatctcttggtcattgaaggtaatctgaccactggttggcgttaaatcaccggcgacgatgttgaaaaaagttgacttgccggccccatttgcgccaagtaacatgacgaattcatcaggctgaatcgtgacgttgatgtcttgcagcaggtttctctgatcggtttcggtcgtgagttgataattaagttgattgagggtcatacgtgcggtcattgagtggtcagtcctttcttttgttggggtgagatgatgaagatcgcgaggataatcgcagagaagagtttgaaatcattggcgttgaatccgagttgtaagactaataatagaattaaccggtaaacaacactgcctaaaataatactgattaatttcgataagaaatggcggccggttaataagcgttcaccgatgatgatggcggaaagaccgatgaccatgaccccaatccccatattaacgtcggcaaagccgttatactgtgcaaccaagccacctgttaaggcgatgagtccgttggagaggacaataccgatactgttagtccgtttaacggcaatcccttgtgataaggccattgtcggattatcgccagcggccagtaaagactggccaaattcggtgtataacaatccgactagtagcacgacggcgactaaaataatcacgaggttaatcagaatcagtcgattgtcagttgataggccactaaagaacgggatttcgtaaagactgtgttgactatcaatcgacagattggcttggcccagtattcgcaagttaattgaataaagaccggtcaaggttagaatgccggctaataaactttgtacgtggaaatagttgtatagaatagcggtaactagaccagctaaacagccaccgataaacgtcaccagtaaggttaatagtaggttgtggtgattctgcaacatgatggcggtcacggccgcaccgaggggaaagctcccttcaacggtcatgtcggggaattttaaaattcggaaggtgatgaagacaccgagactcagtagactccagagcagcccttggtcaatggtcgaagtgattaaggtcatttgatcaccgtgcctttctgttgtgcggtttcgatggtgtctttaggaattgtgatgtgtaaggctttcgcttttttgagatttaacactaagtggcctttacgtagataatgaataggtgtcgttgcgggttttgctttgccacttaagacttgggcggccatcttaccggtttcgacgcccaaatcgtattgactgaggccgacagttgcgaggccgccatctttaaccatcgtttcggccgaggggaagaccggtgttttggttttatcagtcgtgcggacgagtgtgcccatcgcactggcgattgtattgtcggttggcacgtaaatcgcatcgactttgggtgcgagggtttggctgacttgttcgagatcgttgaccgaactgagactcgcttcgacaactgttaaaccagctttttttgctattttcttgaacaaacgcatttggctagtagccgagttatcactgcttgagtagagtacgccaaccgttttaagttggggcataattgtttgcattaaagctaattgcttttgaatcggtgcgcgatctgaaacaccagtaatattggcgccgggtcgttggttattgtggactaagttagcactagcgggatcagtgacggcaccgagaatcacggggatttttttagtggcattcgctaaactctgagcggccggggtcgcaatcccaatcgtgactttcgctttctcagtgacaaagcgattgctcattaaacgcaaattactttgatcgttttgggcgttttgaaaatcaattttgatattttgtttgttatggtaaccggcagaggctaagccggcgataatcccccgatgaatttcatctaaagcgggatgtgagagtggttgtaaaatggcaacggttggtaatttagcttggcgggcctctttaatggttttgacgcctagtaaggcgagtagcccaccgaagattagaatgagtggtaaaaaacgtttaattttagacattggcaattactcctttgatttttacaaataaaaaagtcccctacatagcggtcatgtaggggacagaaaaagcctacacggatttactcgagtaaaatccatgtaggcttaaaattcaatcgataaatgatgaatggccgcatggatacaatcaacagactgtatccatttgcgaatacaacctgacttagcggctttgccaacgaatattcaactgtgtcaagttagtatgtgtcatttcatttacctccgatttatttgataagttgaagtatagagacatatgaaaaataagtcaagtttttttgaaaaaatatttttgaaaataataacggtctaggttgaaaatgggacgattcggcttgcattttggcgccaaaaaagctaaagttattaacgtatacttgtgtttaaaaacaggaggaataagagaatatggcacatatttcattcgatgcatcacgtttggacaaatttgttcaatcaaacgaacttgcagaaatgcaagcaatggttaatgcagcagattcacaattacggcaaggaactggcgcgggcaacgatttccgcggcttcttagatttaccagttaactacgataaagctgaatttgctcgtattaaaaaagccgctgctaaaatcaagagcgactcagaaatcttcattgcaattggtattggtggttcatacctcggtgctaaggcagcaattgatttcttaaatacaacattctttaacatgattccagctgaccaacgcgaattcccacaagttatttttgcagggaactcaattagctcaagttatttaactgacttagttaacttgattggcgaccgcgatttctcaattaacgtcatctcaaaatcaggcacaacgactgaaccttcaatcgctttccgtgttttgaaagacaagttaatcaagaaatacggtaaagatgctgctaaaggccggatctatgcaacaactgaccgtgctaaaggcgctttgaagactgaatcagacgctgaaggttatgacgaatacgttgtacctgatgatattggtggccgtttctcagtattgacagccgttggtttattaccaattgccgttgctggtggcgatatcgatcaattgatgcaaggtgctgctgacgctcgtgctgaatacaatgacactgacgtcactaagaatgatgcttacaaatatgctgccttacgtaatatcttataccgtaaaggttacacaactgaattattagaaaattacgaaccaaccctccaatacttctcagaatggtggaagcaattaatgggtgaatcagaaggtaaggaccaaaagggtatctatccttcaagtgctaacttctcaactgatttacattcattaggccaatacattcaagaaggtcgtcgtaacttgatggaaactgttgttaacgttgaaaaacctaacagcgacatcgatattccaactgacgctcaaaacttagatggtttaggttacttagaaggccacacaatggacttcgttaacaagaaagcttaccaaggtgttgttttagcacatactgatggtggcgtacctgttatgaccgttaacatccctgatcaaacagcctacacattaggttacatgatctacttcttcgaaatggctgtttcaatctcaggttacttgaatggtattaacccattcaaccaacccggcgttgaagcgtataagaagaacatgtttgccttacttggtaaacccggctttgaagaactaggtaaagaattaaacgaacgcctataattcaacgtttttagcatttatttaatgtattaaatatagacttatttttaataaaatttgctcgcgacttacttttgacttaccgttgagcgatttttgttaaaggtgggtctttttttatttggttagttgtacttcaattgtaaattcgtcatacaaaaaagcctcaatttttgataaattgagacttgttcggcagattattaatattactgcaatctttttattcatattttatgatccttttaggtcaaccaatggcccttcagccgtgaatcgaacgcgactgaagggagaccctaattacctgtttgataatgatagccggctggcaaggattcaccaggacttaatctatgagaatggccctttcgggtttcccaagtatagccatcttcaatagcccagcggataccagtcgtattgttagacgtggttgtattagcagctgcaattgaagtattttgagcagcaacagcactttcggatgcagcggcactttgagcagcagcaacaacactttcagatgcagcaacactttgagcagcagcggcagcactttcagatgcgacgatactttgggaagcagcagcactttcagatgcaacgacactttgagaagcagcagtactttcagacgcggcaaccttttcagaatcagcactttcagatgcagcaatgctttcagaagttgatgcacttttagaatcggcaatgctctcggattcatcagaagagtcattactatcttttaaggtttggctactttctgttgaagccttactagatttgacacttgttggggcgttcattgcacccaataaaaataaagtaatcgttattgcggcaatccaacgtgtttgtaaatatttcgatttatttattggtagtacataaggtggctgtttttttaaaatgaatttgtaaacagcgatatacagaacgtaaactaaaccgataaatgctaataaattaaatagattaaatttaataattagagcgagtattaggataatcgcaattgcaatcaaccatttttgattaggcttttttggatttgatgtgatgttgttgttctttgttctaaggttattcgccgtatttttcgatttatcaggagaatctttaacgtatgaaacgcctgttccagaaatagtatttgtggttcgcgtccccccattagctttttttgtatatctaaagcctttaaaaccagtactccagccaatcccagacttactgagattcagcctgaaatttttacccatattaatactttttctatatctccaacccattttaattcctccaatagatatagcttttaacgtcatcagtatttggacaaaactagaaatagaatccccaagattcatatttttagctaatccccagtcatgaatcaactggcaaacaccgtatcaggttatgctgacaaatttgtccaaaaattcggattaaatttgcaatctaccaattaacgtttgatttttttcaatagcgattgaaacgacgactggaatagccgtctctttttgcaattgatccgctaattcacaagccatggttgcaaactccggataatcatacgtcggtccggcaatgacgacatccgcttgcattttttcacacattttagtgacttttctttgaacttcggctttatttccctggtaataatccgtcccacaataaaaggtccccataacttctgatccgttcttttttagtactttgtcatacgtatcagcggcccccatcgctagttttttaccacccaatggtgtgttggccttttctttaccacctaagccggcttgcatctggtccaacaagacaatgactttcataacgtttcccctccttttgactaatgttctcgatacaaaatattgtggaatgtatacttatcagctcgataatgcgaattatcataaagaattggataaccatccatcgaataggcaacggtgtgcgctaagaaggccggtttaccgacctcggtttctaaaagttggctgatgccatcctctaacaggaccgattcgagttcttgattggcataaccaatcgccatcgtctgttcgattaacttatacaatgaaccttgcgcttcgtgagctgttaatttcggtaaaatcctttgtttcaaataaatctgttcgtgagtcatcggttcatgatcaacaaaccgcaaccgttcaatttgccaaacgggttcttgtgcgacgaggtctaacttcgcttcgacataatccggatagacaatcgttcgccgcaaatcgagcacccgcgtactaacatctaattggaattgcttagccgcttcagtgaaccccattaaaccgctcgccccactcgaaatcttaccgtgagttgctaaaacatacgtcccgcgattacgatcgcggacaacgacttgttgtttttccaataaatcgattgcttttcgaatcgtcaatcgagttgttccgaattgttgcgctaaatcactttcggacggtaacttctgatgaaccccgtaaatccccgttcgtacatcggtccctaatttttctgcaatttcaacatacaaatacttcgccattattctaaatactccttctaatcaactggtgctttaatgcgtttttcatacgcggctaaccattccgccgaaatcggttcgatgattgtcgtttgatccggtcccggattagccataaaaatggcgggcgcttgttgctcgttacctgcggaaaaagtaaattcaacatttgtggcgacgccccattgaccttgtgcgttcaacgccaccaatgaaaattcgcctactttgccgtaacgtttctttaatttttcaacgaatggataaacggcttgatcgcaggcttgttgtggtgttaaaccagtccccatcaatcgcacaatttcataggatagacagcccttcattaaatcttcgcctaaacccgtggcagctgctccaccaatttcactatcgacataaaaaccactgcctgataaagctgaatcaccggttcgacctggttttttcataaataaccctgacgtcgaagtgccggctgccatactagcttgctgatccaaactaatcatgccgaccgtatcatgaccatcatacgggcttaaattcttttcattaatttctttaacccgtttggcccagagtttatgcgcgcgttcagtcaacatgttgcgtcgttcaaaaccattaaacatcgcgtactgggaagcccctgcaccaaccaagaaactattgaaatgatcattgctaagttggcgggcaacactaatcggatttttcacatcgctaatgccagcaacggccccgattgcaaacgtatcgccatccataaaagcggcatccatctcaactaatccttgttggttcggtaaccccccatagccaaccgatttaaaaaacggataatcttcaaccgcttgaatggcggtctcaatcgcatcggtactgcgaccaccttgttttaaatctgtcattgcagctgtcaatccttcgtgcgccatgcgccaagtcccaatcattgcatacgtcaaaatcatcatctccattttatatgtaagcgtttaacacaaactaagtataatcaagattgtatatacaatcaatccggaatttcattaaatagcacgtcaacaaaataaaaagcagccttctcaacgagaaagctgcttttaaataacttatttattttttagatcatcaatcgaattaatattagtcatgtacttcggtacggccaagccgaccttcgccccttctaaattgggccctaaatcttcaacctgacctttataatcttgataatataaaccagaggtcttcggtaaccaagcacagacctgtgcatctgcagcattagtcgcgactgacgcccacatcggttgaatttccatcgcttggatggttggttcataaccttgttgacgtaaaacctccgcaaccacgttggtcgaagcaatctcagaatcccaagccacataggtcaatttaatcttggtccctttgacctttttaacccctttggtccacttagcaacttgtttgggattggctttaatccaatcacgcgccgctttttgtggatcaacaccatcattgacctttaacatgaccactgacatttcagtcggtgtccaatggaatcggtccagaatggtataagcttctggcatcgactttttaaggcctttacgaacaatcgtattgatgtgttccgtcttaccataaacattcttaggatctttcaaaaatttaatgggatatttagtaaacatccaatgcggttgccaaccagtgaccacgatcggccgcttatcagcaatcgctttacccaaagtgctggtcatcgcagccgttgaactggtttgtaactgccacttttgatcttcaaggccatatgccgataacgctttttgcgtcgacgccataatcccagcgccggcatcaatcccggtaatcgtgtaattgatttgtgaccctaatttttgttgcgcatcatagggtttggtttgcgagctacaagcccccaggacagtcgctaatccgattacggccaatagggtgattattctattctttttaaacattaaaaatctccccctactttgttcgttcgcgattcaacgcctgtgttaaccgatcaataataatcgctaagatgacaatggcaagcccggcagcaaaaccgcccccagcatcattccgaccaacggcaaagtaaacacgtgtgccgagacccatcgcaccaatcatcgatgcaatgacgaccatcgagagggccaacatcatactttgattgataccagccattaaggtcgatttagcgagtggtaactggactttaatcagtttctgccattcggttgaaccgtaagaatcagacgcttcaatcaattcagttggcacttggcgaatacctaaattagtcatccgaaccgttggtggcatcgcgaagatcaccgatgcaaagacgcccggtaccatcccaatcccaaagaaagcgaccgccggaattaagtaaacaaaggccggcatcgtttgcatgaaatctagaatcggtttaaatattgcctgggcaatatcacttttcgccatccaaatacccaacggtaccccgatgactagcgagataagactcgacgttaacaccaaggtcaacgtctgggtcatatctcgccagaaatctaaattccaaatcaatagaagaccgagaatttcaaagataatcagaccccattttttagtgtcgcgattggctaagtaggtcacgccgaccacgattacgataaagagccagattggcaatagatcaaagacccactggaatccgttgataataccgccaatgaagttcgtcagaccgttaaagaatccggtaaattgtgttaaccagtcaacaaagtgatccatccagtctgctaaagggactttaggaattgtcattaaattaagcaagatggttcacctcatttccagcaagtgcgcctaatactgcaccacgaataatgatcccgcggagttgtttttgttcgtttaaaacggcaaatggaatcccagtttgcgagatatcatctaagatttcattgattggtgtttcttccgtcgtcgttggtacagcggtattgatcaccgattgtaaatcccgactgtcttgacgaactaattccaagacatcgcgcgcatcaataatccccaccaattcacgttggttgttgaccacatagacggttgaaacttcattttcacgcatccgtttcaaggccaagcgcggaccatctttatcgatgttaatcgtcgttggtcgaatcatcacattaccagccgtataaaccttactacggtcgacattttcgataaatttctcaacatattcatccgctggccgggtcaaaatatcttccggtgtcccggtctgaacgatttcgccgtccttcataatcataatatgatccccaagttttagcgcttcattcaaatcatgactaataaagataatcgttttatgcatcgtcgcctgtaaatccaatagttgatcttgcatatcggaacggttcaatggatctaacgccgaaaaggcttcatccatcaacagaatttctggatcattggctaacgctcgagccaagccgacccgttgttgcatcccgccggataattgcgttgggtattgattgccataaccatctagcccgactaagttcaaggcatcggttgctttttgattgcgcgtcgctttatccacaccttgaatttctaagccataagccgtgttatcaagaatggtccgattcggaaagagtccgaagttttggaagaccatactcatttttttgcggcggacttcgcgtaacgccttcttatcgattttcattaaatcgtcgccatcgattaagacgctaccatctgtcggttcaatcaagcgattaatcatccgcactagtgttgacttcccactaccggataatcccataatcacaaaaatttcaccagattcaacttcaaaattagcccggtcaacaccaatcgttgcgccggtttcctttaaaatcgcggctttcgttttgccctgttgtaataactctttggctttaggaattcgtttaccaaagattttcgttaattctttgacttgtaatttgacagtcatagaatcctcctttttctgaaaagtgtacctaataagtatagtcgtttacagcaaaagttgcagatggcatctttttcgactcatcatattctcatattggcactgattagccgttcacctttaaaatccggataattcttgagctaccatattaacggcatttaccacgatttaaaatcgacagacacactccgccttaaatgcaactatttcgttacctaaattaaaattgaatgagctttttaattattttcacggaatacatcaaaaaggccgcgactcagttagactgaatcgcggccttgatactcgacttaattacgccgttttatttttttgttggtaacgatggtacaagcccattgctaaaatagcaaagacgattggtccaatcaccatccagaaggcatccatgtattggccttcgataattggttgaataatcgtgaacgcaatcccaaagactaaaaccaaatcgacaaccacggtaacggctttaaccgcgagtggtgttttaaagaagacatagggccggtctaaatcttgacgcgccttgaaatatgggaaggccgtgactaagaatagatagggtaacgacgtcgaaacattggccatcaacgttaatacattatagaaatcgccggcagctttaccaccaaatgaaatgactgcgattaaaaggcaaaccaaagcggcttgtgcccacatcgctttttcaggcatgccgtttttattaacatctgcaaacccgttaggccagagctttttaggcgtgccgagtacaaatgattttaatggtgaataaatcaaaacagcaaaggcacctaaataactaacaaacataatcaaacccgttactcgtgcaaaaattgtcccaatttcaagcgccacaccttgactcattccaaaagcgtgcccgaattggaaacctaagttttgcatcaagacgtacgtaatgttccccagattggctttatcgccacttaatatttgttgccagttggttgaaatgccccacatgaagatggctacggcgtaaattaacgtaatcatcgcagtcgcaatcaacaaacctttaggaaaggtcttttcaggttgatccatactgtcggttacaccgcccatggtttccatcccggcatacgcgaagattgaaaagaccacaaacgataacatcccgattggtgattggtaactagccattggactcttcacgaaagtggttactccgtgaatcggttccgctaaatggaacccatttttaaatagaatcgctaagctgacaactaagaaagcggcgaataaaaaggccaccgcagccccacttaatgacgcgaatttctgaatcttatcaatcccacgactggataagaaggttaagactaaaatccaaataatccctaagataccgacaacttgcgtgccgctcattccaatgaagtgccagctagccgtttgatctgaaccttgtaagaaggttgagaacggaatccacactttaacggcagttgaaaccatccacacgatccaagatgccaaccagataaaagttccgataaaggcggctttttcaccaattgattcttctaaccacgaatatagtcccccacgtgattctttcaaagaggaaccgtattccgcaaacatcaatgatgttggtaagaagaagaagacggccgctaaaatgtaccagataatactggcgtaacccatcatgtagaaggccaccgttgtattcgcaaagccaaagattgatccaaatatcatcaagatcaagccagtgacgttaattttttttgatttttccattatatcaaagtctcttttcaattaatttattggtataaatatacaactcgttcggtatattgtcaataatttatgaataaaatcaattatttccgtctttaatatgcagatattcataaaattatgcaaataggcttccagttgattcccgttaaccaaaattattttcagtaaacaatctttaacccatcgaattaaacacgaacattatttcggttcaattctaaaaaagtttgtgatatactgataacacaatcaacggaaggtggtttatcgtttggctattacattaaaaacgtcctatttttctgcaaacagccccaatcatgtcgaattccacgaacaatctttaatcgaattgattgaaaacgggcaaattggccaaatcattcatcaatcagatccagattaccagaaaaccctaacagcggcccaaaccaccgatcaattaatcaccatagcgcctggtcattatttattaccaggcttcatcgatttgcacaaccatgcaccgcaatggccgcaagtcggaattgcgcttgatcgaccactcaacgattggctcaatcactacactttccccttagaggcccgttttgcggatttagattacgcgacggccgtctatcgcgacttagttcataccttattaaccaacggcaccactagcgccctttattttggttctatccataataatgccaatttaaaactggccgaaatctgcgcacaattggggcaacgtgcttttatcgggaccgtcgtcatggataatcccgaacaaacacccgctaattatcgtgatgtgaattcagccacggcgcttagtaagacgcgaaccttcatccaggcgattcaaaatcaacatcatgatcaattggttcaaccggtcatcaccccacggttcattcccagttgccaaaccgaaacgctgacccaattaggccgtttagcacaggaaacccaactacgggttcaaacgcattgcagtgagagtacttgggaacatcaatatgttttggaccgattcggacaaaccgacagtgttgtcttacaacaattcggcttattaaaccaacacgccgtcttagcacatgcgacgcaactaaccactgcggatcaacaattaattaaaactgaacaggctgcgattgcccattgtccgctctctaacgcctatttcggcaatggcgtcttccccactaaacaattattagaccaacagttaaaaatcggtttggggaccgatatcgctggcggttatagtcccagtctctacactaacttgcaaacggccgtcactgcttcgcaaatgcgtcaggacggtgtcgatgcccgattaccggctgactcccgtggcgttgctgatagccgcatcaccaccgaagaagctttttatcttgcgaccgctggcggcgcagctagtttagccattaacgctggtcaaattaaactggggatgcttgctgattttcaaattgtccaagcggcgccccaattcacaaccctcacgccagccgatcaattgacccatcttttattcaaccacaccgcccaacaaatcaaggccgtctatgtgaacggtcaattagtccatcaaaaggagcaaaattggtatgacaacgcacaataaacaattaacaatcggccccgatgagtcgatttcgaatcaagaggctggcttactcggcctacaacacgttttagcgatggatgtttacgtgccacccgtcattattgccggcttactcgccatgagtatgggcgccaagaccggcttaatccaagccactttcttagcggccgggattggcacgattatccaaacgaaatactttatgaagatgcccgtttcgcaaggcccctcttttgtcccaattggtgccatcgccggcgtttatttcgccagtggcgcggccaatggtgggatggcgaccgtcttaggcgcctcggtgattggtgcgttaattttaattctattaggcttaaccggcttattccaaaaaatcatcaatagtctggtgccccaatttgtcggcggcacaatcatcaccgtcgtcggattatccttgatgccttccgcattaggcgataacattttcaaagcttccggcaacgtcggcgataacctgattctcgcgattacgacgattgcgattttggtcgcctgcgtctcactaggcatctatttccccaaactgcaaaaactatttaaagtcagttccattatcatcgcattgttaggcggcacgttactcgcaaccttaatgggtaagttcgattggtcaagcgtccagtcggctagttggttcagcctgcctcatttcactatgctccactacggcatccgcttttccggttccgcgattctaaccttcgttattatctacgccgtcttaatgacggaaaccaccggtacttggttcgcaatgagcgccgtgaccgaaacaccaatttcgaagaagcaatggaaccacggaattatcggcgaaggcctcagctgtttaatcgcggccgtattagggggttcaccggttactggttacgcgaccaacgccggcattgtctcgatcaccggtgtcgctagtaaaaaagtcttcatctcagccggcatttggtttatcatcttcggattcttcaataaactagccgcctttctatcagcgattccagcgcccgtgattggtggcatcttcgccatcatctgtgccaccatcatgctcaacggtctgaacgttttacggacccgacaacaagaagaacgtgatatgtacattatcgggattccaattattatctgtattgccatcatcattatgccccaatcgctcgtcaaagcaaccccacaaatcgtccaatacttactcggttcgccgatttcaatctgtgcgattgctgcgattgtcttgaatttaatcctaccaaaagatcgcaacattaccttctaatcaacaaaaagaccgtttcgaaaaccaattatctggttttcaaaacggtctttttctactcgattaaacactgaccatccgaatggtcataatattcttattcatcgagatatcttcgacaatctgcgaatatttcatttcccggggaatttcgatgcgataaacattggtgtaaatcgtattactttcatcttgcgtcactgagaaattaacatcgcgcacttgaatctcgtgcgtttcaaaataatcctgaatgaattctttggtggcgactttatgcttatatttaatttcgattttcttcaacgtattgatgtgaataatcttcttcaagaaaacaatcacgaaaatcacaaaaactgaactaatgactgcaatctgataataacccatcccaaccgctaaaccaatgccggctgtcgcccataaagacgccgccgtagttaacccttgaattttgtggcgagtgacaataatcgtcccggcccctaaaaaaccaatcccactgaccacttgcgcaattaaacgcgcttgatcagaccgaatgacggtcgcaatcgccaaatggcttaacgcaaactggacattttgcgccgcaatttcctgttgaatcatcgcaatcacacaagcccccaaacaaaccaagatgtgcgtgcgcatccccgcggggcgatttttatattcgcgatccgaaccgataatgccggcaatcacggttgctaacgtgagtcgaattaaaatatgaaccgttgtgacttcaaacaaatggatcccccctatactgttcaactctagtttagcacacaaaaaaggctgagcgtaaactcagcctaacaatactaatattcaatccttaccatccactttatcaaccaacttattgaaaacaccagcaactttgtcttttaattcgccagtcttttctttaattgtatcacctaaatcatctgccttttcagaagccttgcccttgatttcttcggctttgcctttggcttccaactgttggtcatcggtcaccttgcccactgtctcttgcactttgcctttaatctgatcagttttatctgtcatctgtaaaaccgcctttcttctgattagttcaatcgtagcaagttgaagcgagcgggagcaaaaaatacgcttagttagcgaatactttatattaatttatttatttgattttctaaacgatgcaattcaactaaaatttcctgaaaactagggtattcattaaacatcatatttttcattacgtcataatcctttgataatccttcaatctgcatttcattcggcattaacttaatctttcctggtatcgcctcattatatttagctgaattatccgcataaaatttatttttaaatgacacaacttctttaagcagcaccacatcattcaacgcttcatctttaattgttgattgtgataattgataaatatcgtaataatgtcgcgaatatctcgcaggcgttaaagtcttagtccggttcgcttctttatgcataatcgtcactttttcccaaaaagttcgtttagcctccaccgttggaacgatgaccaatttatcattaaaaatctgagggaattcttcaacgatataggcagatattgggtaatttttaacaggtgtccatgcagctaatggtccgatttctaaccgaatttcttatagaatactgttatccttgaagccattcggatattgtatctggactgtttgcgaatctattgatgaaaccttcaatttaaccttttctatcgacatttctattaaagttttgtttaattcaggtaccaaaactaatctaatccaattagctgcccgctcattagcttcattgttaaactttatttgacctgtcttacttcgttcatcccacggttcattttttgaataaccaagaatttgccaatctaagattaaatcaatatcttccgaaaatcgttgaattttattgaaaacttttgataatgacgtcccacctttaaatgcaaatagctttttgaaccgatcatgagaaaaaagtatttttaacattaatacaatccaataatccttttcaaggattgcttcattgatgcctaaatccgctgaggcaattttgtacatatcctttcgttcctcatccgttaattcaaagtattcaagtatttaactcgcctccatctttatcactaaatctttaatccaatttcgcgataacagaacatctttttttaactgttcaaactggtctatagttaatttacgtttaatgatgcttaaattttcagaattaacattattttcacccaaagccttaaacgcttcaataactaaggcagaagtatatatcatgttaatatcccttgataccgtacttctgaattttatttttttcccattttttaaaattatttcacgactgggaccattactccgatattcatagctattaggtacctgagtcgtcaatcccaactgatttaaagctgtttctcctgctggaattattctccaatcattttttcgagcataggtttcagcaatctcactaggtaaggcaggcaccattctctgtaacgttttactgtaattcggtttttgataaattcctcgatagatgattcttaatttttctgtttctactaattttcgaacagcatcctttattgtattgtacggcgcttccaaattagaaaaatcagccaaaataaatagagtccctttaggcgctcttttaaccttattatttattttatctataatcattaaaagcctccaaatatacggattaatcaaatatatgaacatctcataaaaaccatcacaccagttattatagcatttataaagcacctaaatatagttatatttaggtgctttcttatgatgcaatttataatgatttaaacaacgtctgatagatttcaataaagtctaagaacatcgcctttgaaaccgattcattatcctgatgcggtgtattatttcccggaccataggccagatagctaaaaccagtttgattcttaattaacaatttagcggcgtcggtgccaccagaaatcccaacttttaaaaattcggccggtcgatagtctttaacaccagcagcaagcgccgcctgtttcaactgttctgcttcagcggccgatattttttgacgtctggcgtatggttccgcaattcgttgcaaatcggttaataatggcgcgttgacatcccctaaaatcgaaacaatgttcatcgacacctcgacgctgatttgaccggtcgtcgtttgattatagttggccaccacgtcatcaatcacgttcaaaatttggtcgtttgagacttctggaatcgtccgtagattcaacccaactgttgccaagctaggaatcgcattgatttggttaccaccactaatcgtatcaacgtttaatagagtttcacctaagaccggattggtaacaccggccgttaactggccaatttgcgttctaatttgtgctaaaaccgtcagtaaatgttcgatcgcgttattgcctaatgcgggcatcgaactgtgcgcggctttaccaacggatttaatttcaatatccaattcacctttattggcgtacaccatattataatagccggtcggttctgcaattaacaacgcatccacatcgtcgctgtaaccagccatctcgagtgcttcagcccctggttgtccaacttcttcaccggcagttgctaataaccgaattgtcccattgaaagtcgcctggctttcttttaattcgagcatcgcaattactaaagccgctaaaccagccttcatatcagtcgtccctcggccaaatagttggtcgccttttggggtcagcttaaacggatcggttgtccaattagccacatccacatcgaccacgtccatgtgaccggaaaccgccagaatcggatggccactgcccatttcagcaaccaaattggcgcgctccggctggccgactagtggtatcacctgattggtaatccccgcctcatcaaacagcgttttaagatacatggcaaccaatttttcatgattattcaccgatttaatttcaaccaaatgctgtaaaatggtaactttctctgctggactcataacctaacctccatataatttcgttatggttagtatagactagtgcaagcttgacaactagtgatacttaaccagattagctaattattgaagggaacatcatttattgccgtgattccataacttagatgctgtagcgcaatgtgtgcaacaatagtcggattacaattgtactcaaccgctatttacaaaccctaccagttcccaaacaaactcgaaaataatagcgagctaagcgggcttcgacccgtcttctttaaagaaagttctttgagttgcgctactatttcagccgcattctggttcaactttaaaccttcaaaaccaattagattggtcatttctttaagaaactgattaagcgcgacattaatcataaaatcgttcagttcaggctgtgtcaaattatcgatacattctgtggttaattcgattgaatcctgacgcgataattcatacttaagattaattaaaagcgttacgatttgttgttgtctagaaatcggcatatttttcactaccccttacagaaatttagtcttattaaaacttatcataaactagccgcctaaaggtgaaaaattcctaagtcgtcccaaaatcattcttgaacggaatgacgagtgattttccataactgagatgctataatgaaaccatgcaaaaaaagcgcaaggtgtgcctagcacctcgcgcaacagtagtcgtattgcaatgttgattagccgctagttagcggctttttttattgcgatcgattaaatcttgagtctgtttccagatcaccaagattaatttgaccgcagcaagaatctgtaaaaacagacccatgggcaattctccattgttttatttaatcgcgtttcagcactcatcaatctccgtccaagtcaaaatacgccgtcatctaagttcagatgatggcgtattttggtttggtactcaattgatacccgagtgctggcacagctaccgcaagtcgctcacctccacttgtcaattttgaatcgactgagtctggcgcttgcaattaacgactgcctattactatattacgcaaagcgagatacttttttgtgtccggtatcaagaacacaaaaaacaataatccgtaaagttgtcttgaaagttgcaagtcccccatccgacttatatactataaatataaggaattgcagtatataaggaggcggctcataacaatgaatactttagcccaactggaacatgactttccaacatttatttacaaaaccgcacaagaatatggtttgtctaaagataaaattcaggcgttaacaaatgatggcaccattgaaaagattgaccgtggtgtctatattttcccgggctacctactcgatgaatttagcttgatcagtcaaaagttctcacgtggtgttttctcattggtcagtgccttgattattcatgacttaactgatgaaatgccacttcattatgatcttacctttccccaaggatatcatccaagcgctgcatcgctgaaaaaatatcctattaaggcacgctatctatcgaaaaatcgctatttacttggtatcgaaactagccgaaccgaaaatagtggcacggttcaagtttattctaaagaacgaaccttattagatacttgggaatcaaaacaaatccaaccatacattaaaaatgatgcgcttaaaaaatatctagcaagttcacctagcgcagaaaagtttaaaagtttaaccaaaatcaaggatgaattatacccaaacagttccttgctaaaagtaatggaggtttacatgcaatgagtgaagttgataaagttctaccgctaatcagcaagcgcgcccgtgaacttggctacaatattcaacattttcagaaactattttttctggaacactttttaaaacagatctctgaatctaattatcgtcattactttgttcttaaaggtggctttgaaattcaaagcttggttggaattgaaaatagaatgacccaggatcttgatgcaatctatgtgggccatccttacaaccagataaattaacaaccgttttgaatgaggtcttcgaacaatctacagattatgttagttttacaatcaagtcgattgagcaaaaacagcttgatgatgattatcccggaattcgtgttaatctgttggcacaaatggggaaaagtaaagtcagtataaagttagatatttcaaaaggtaacccctatgagacgattccaatcatgcttaatcaccaaagcattttaaacgcagatgacaaatttccaatttatggtattcccattgaaaaaatcttggcagataagttatcagcatttctaaatcatggtatgctaaatactcgtgctaaggatctatttgatgtttattcattgtccattctctatcgaactgacattgatcttgtgcttttaaaaaaagaatttttcaaaagtgcggcgtttgaccatatcccaaacaaaataattgaaaatcgcttaagcgaaatcagtgccctatccgattctgaaagcttgcgcgcttcatggcaacagtaccagcaacaatatgactacgcagagtcaatcagctacacaacagcattagacgcgcttttcaatttaatgcaggaaattgaaaattaatactctaaaacgagttcgaaagattacacaatattgttgtattgaattagaccatcactttgataattcatagccattctaatttaatttatttctcgtgatttcccccaacttagatgctataatgaaaccatgcaaaaaagcgcaaggtgtcgttaccacctcgcgcaacagtagtcgtattgcaactttgatcagccgctatttagcggctttttttatgcaattttttcagttcaagaatctgtttccagattttcaaacctaattgaattgcgacaaggacttgaattaacaagctcatcagcgattggccattgttttatttaatcgcgtttcagcactcatcaatctccgtccaagtcaaaatacgccgtcatctaagttcagatgatggcgtattttggtttggtactcaattgatacccgagtgctggcacagctaccgcaagtcgctcacctccacttgtcaattttgaatcgactgagtctggcgcttgcaattaacgactgcctattactatattacgcagagtgggttacttttttgtctaagctcgtaaccaaaatcaaaaaaacaccctcccacaaaagtgagacggtgtttcgaaatattgatatataagaatatattaacgttttgagaattgtgatgctttacgagctttcttaagacctggtttcttacgttccttcatacgagggtcacgtgttaacatgccagcgcgtttaagagctggacggaagtcaggatctacagttagcaatgcacgtgaaataccgtgacggattgcgccggcttgaccagagaatccaccaccgttaacgtttaccaagatatcatagctatctgttgtttcagtaattgttaaaggttgtttcatatctaaaatcaagttagcaaatgggatatagtcaacaacgtctttgttgttgatagtgattttaccagtaccgggtactaaacgtacacgagctactgaatttttacgacgacctgtaccgctgtaagttacttgagccactatagtttcctccttaaataatgtccgtaatgtctaagacttctggattttgtgcttggtgtttatgttcgccaccagcgtaaacgtgtaatttcaagaattggttatgacccaaagtattctttggtaacatacctttcactgacatttcgattaaacgatcaggtgtcttttcacgaatttcgccagctgaacgagtctttaaaccaccaggatgattactatggtgatgatataacttgtcagttgcttttttacctgttaatttgatcttttcagcattgatcacgatgacgttgtcacctgtgtcaacgtttggtgtaaatgttggtttatttttaccgcgtaagatagaagcgactactgttgataagcgacccaatgcaatatctgttgcatcgatcacataccatttacgttctacttcgcctggtttagccatgtaagttgtacgcacgatttattcctccaatattctgtgtttgtttgacactcaataagttccggggcctatcgtggggcaaacaataccagatactatagtaccctaatttattgattaagtcaattgaatctcaattattttcatcagttttataataaacttctttcaaatataaaccgctagctggcgcggttgaacgagcctcttgtcgatccttgacttcgtacaatcgtaaaaagtcgtggacgtcgcggcggccattgccaatctccaacaaagtggcgactaaaatccggaccatgttgtacaaaaagccgttgccgtaaaactcaaaaatgagttcgttagctgactcgtcgtattcaacagtcgcgtcataaatcgtccgcactttattcttaatcaccccaccagacgccgcaaagctcgtataatcgtgtgtacccatcacatcaggcattgccgcctgaatacgactgacatcgattggatacgggtagtggcccgtataacgccgtttaaacggattggtgtaatgaccaagatcaacgcgatacaaataccgtttaccactggtaccgaatcgcgcgtggaaatcaggagccgccaactgactgtcgacaacctccatatcaagcggtaggaggctgttcaatgcgcgtagcatacttgtagccggcaagagcttgggatagtcgaaatggacaacctgaccgtatgcatggaccccggagtccgtgcgaccagaaccatagactgcgaccgcctcacctttactcattttcattaatgctttctcgagcgtgccctggacggtacgctgattcggttggctttgaaaacccgcaaaatcagtcccatcgtaagcaacggtgacgcgataacgttgtgtcatactatccctcatcttaattcaatgttactttctattttagacgcttttctgaaaagtagcaatcgctttttgataattagtcagatttaatcatatcgataacattgttctatattgtataattatagttgaaaggaggtgttcatgatgaagtttggttatgctcgcgtctcttccgccggtcaaagccttgcaacccaaatcgcacagctcaaggctgagaagtgtgatgtcatctatagcgagaagtttatcggcacaacagtccatcgaccacaattcgaacgactgctcaaccgcgtccagactggcgacacgattgtcgttaccaagctagaccgatttgcccgcaacaccaaagaagcactcgaaattattcaagaactcttcgaagcccaaatcaagattcacattctgaatatgggaattatcgaagatacaccctcgggtcgcctaatcttcacgctctttagtgcgttcgcccaattcgaacgggatatgattatcacccgcacgcaagaaggcaaagtcaacgcgcgactaacgaatccggactatcgtgaaggacgccaactgacgtataccgatcaggaaattcgggatgccctccatcttcgacaaaacggcgcaacgttcggatcaatcagtcgaaaaaccggcattagtatctcgacattaaaacgccgattcaaattactaccatcttaaaaagcctgcacaatggcaggctttctttaatactaacgacccggaattcggtctaagacatggttagtttgtcgttgaagcaatgacaggtcaatgccctgatccgtcataaattcttcgctaaaccattcttgataggccaagtccatcgcggctagattagattttccttccgccgttaaaaccagatgaactttccgctgatcgcttggatcattatgttttttaacaatcttattctccctaaagaggacgtttaacttccgcgaaacagctgggcgcgaaataccaaaagcattggctaacaatgtcggttcatcacagtgatcaacaaccatctacttcatgattaaatactgaccgtaattgacatcatattgactggcaataaaatccatcttctgttcgagctttgtcaccttgagatactggattgaagtcaatatttgagacaggttttaagagacattcagaaccgcgtttaccttccacagctcaaataaatcattaatcgtgattaataacttatttgaaccatggaaagcattaaatcaggcggccatttggctcgtaagtgttgcgatttcaacttgtaagggggtctggtagcccagtgaactatgaattctcttcctattgtagaaagcatgcacatattcaaaaaggacggcagcggcagtttcataatcttcaaagaccggcactggataaacacattcctttttgagggaagcgtgaaaggattccattggcgcattatcatacggacaacccttacggctgtatgagtggcggatatgtagttcagttaaacgttgattgtaatcatcgctggtatactgtgatcctaaatccgtatggataatcaggtccccagtaatggttcgatttttaaccgcgctttccagggtctttaagactaaatcagtatccatcttttttgagaacgaatagccgataattcgtcttgagtgcagatccatgatggttgataagtaacaccagccattacgcttcgtttgaatataggtcatatcagcggtccatttttgatttaaaccagtggtcgagaaatcctgcttaagcaagttgggacgctgttcaaccttggttttggaagccgaagccgctttccatttattgacggtaacggagtggatatccagttccttcatgagccgggaaatccgtcttgggctgcaccgacgctgcagtggttgaagttccagattcaattcatggtggatcttcataacgccgtatcgctgcttgaattccgcaaagatccgcagaatccgttgttttaagtcctcatcttcggcccggcgttttgaaggctttggggatcgataacgataatacagagctctggaaacaccgaggattcggcacatcttagttacctggtggtgatggctttcttggtgaatgtaatcaaagatattggttacttctgcgcaaggaagcccagggctttttttaggatttcgttctcctcagacagggaagccagccgcttttccatcgctttaatttcgtctggcgatttaccggattgagttttggcttggccctggatccacttatgaacggttgaatagccaatgccatattctctggccagttgggcggctgattcgccttgtttatataggttgatgatgttttgtttgaattctttgtcgtaacgagttggcatgtaaaaattccttccttttgagagacgatttattcattataccctctcttaaaagttgtctcaggaatcagcttacatccaacatcactaaacgtcgttattcggtcatcaagttcgtattgataagtcacttattctcgcaaaatgccgtctggattcagaatcattcgcgtctgggttgccactcggttattatcgccgtctggcgcgtaaccgacttgtccgatcccggtattcaacgaaccgattaacaatcgtgaactgccagtcccatcggccggatcgcctttagtagcgtcgttccaactatcgttatgcaccgacacccatcgttcgtaagtgccgacattatttggcgaccataagttgaagttattgcgccccgctagaaatgaccgggtcacagttgaactaccgtacaatggtaagtcgggtgccaattctaaatgctgattattcgctagattaggccccaccatgtaccacaactggcttttgccaacgggtaacgtgcctcttaacaactgattatccgttgtgcttcgttcacgattaaatggtgcgctatctttagccgacacgtcggtcgatttggcgctaacaatttgctgatgactgaagccgattagcaaaacgagacccaaaactatgctgtataagctttttcgattcatctgattaactcccccgatcgattcgttgaccattaatttgtaattaacctagttatttaaggtccctaattttttcaacacagcaaagtctataagattgacgatacaagtcaatcgaagtgacaaacttgtaagttcatccccaataatcatggtctttataagaatttactaacaaatatatgaagctaacgttaaattaaggtggttaattagtgatttttgactattttaaatacttgtaaactccgacctcttcgcaagttaactagttacccctttaactaattattcgaaaacaacgcaaaaacaccctatccgtgaatatggataaggtgtttaacttaatatgatttagttgatatttattagcgcagaataatcaagatgacggttagaatcgccatcgcaaccatcgctaaactatccatggtttgccatttcaagatacgatacttactgcggccttcgccaccttggtaaccgcgggcttccatcgccgtggcgaggtcatcggcgcggttaaaactgctgacgaagagtggaattagaatcggtacgatggccttcatctgtttgaataaaccaccctcaccgaaatcaaccccgcgcgcacgttgcgcgttcatgattttagtcgtttcatccattaacgtcggcacgaagcgtaacgcgattgataacatcaacgccacttcataaactggaaaacgaatggcttttaacggtttaagcagcgattcgatcgcatcggctaaggataatggcggtgtcgttaaggtcaacaaggtcgacatgaagataatcaagacgaatcgcatgaagatgtaggccccattcagtaacccgtagcgcgtcaaggtcagaaaaccccattgccaatagatgtgaccgccgcgggtgaagaagatttggagcaagaccgtaaagagaatcaaccagagtaatggccgtacccctttaataaagaaatcgagtttgattttcgatatcagtactaacgacatcgtgaagacgaacaagacggcgtaggccggccatgaacgggctaagaaaataatcccgatgtaatagaaactggcgactaacttggcgcgcggatccatccgatgtaaaatcgaatcgcccggcataaagcggcctagaattaatttattcacggcgttcacccactttacttggcagttgggcttgaagcatcgccgctaattcgtgttccgttaatggcacttgatcgaacacgaaccctttttggattaaagcttgcgcgaattgtgtcgtcgtcggtaagcccaaatgtttcgccgttaaccatgctggatccgcaaagatttcgcgtggcgtcccacttttggcgagttgaccgttctcgagcacaatcacgtgattcgcgtagttggcgacatcgtccatctggtgggtaaccatcacgatcgtcataccctgttcttcgtgaagccgggtaaacaacgccatcatctcgcggcgaccgaccggatcaagtcccgccgttggttcatccaacactaaaacttccggttgcattgctagtacgccggcaatcgcaacccgacgcatctgtcctccggataaatcaaacggcgatttttctaagacgttagcgggtaatccgaccagttccaccatatgaatagcacgggccatcgcttctgcttcaggtacgccgaagttttgtggaccgaacgcaatatccttttgaaccgttgcttcgaataactgactttcgggaaactgaaagaccatcccgactttttgacgaatggctttcagatttttattattggtttcgggcgtgatttcgcgatcaccaatctgaaccacacccgccgttggtttaagcaatgcgtttagatgttgcagcaacgtcgatttaccactaccggtatggccgataatcgcggtgtacgatccagattcaatcgtcaaactaacgtgttctagaccaagtccttgaaaaggcgtgcctggttggtacgtgtaacttacatctttgaatgtaatgtccataaataatcaaccatcctttccgttgtcaggtattcactcggcatgggtaccgccagtgtcgttaacgccgctttgagtttttcaggatagggcacatcgagtccaagcgccattaaccgttgcccgtacgcaaaaatctcagccggcgttccttgatccacgacttgcccgtcatccaaaataatgattcggtccgcactcgcggcttcatcaatatcgtgggtaatcgacaacaccgtcatattggtttcttgtttcaactgatgaatcgtctctaagacttcgcgccgcccctcaggatcaagcatgctcgtcgcttcgtcaagaatcagaatttcgggttgttgggcgatgattcccgccaaggcaacgcgttgtttctgaccaccggataaacgacttggttcgcgtttcgtatattcggtcatgccaacccgttcaatcgcatcggtgactcgtgtctgcatgattggccattcgataccctggttctcaagaccgaacgcgacatcatcttcaaccgtcgctccgacaaattgattatccggattttggaagaccataccgatttttttgcgaatctcccagacggtttccatcgcgagcgggaggccatcaatcacaatcgaaccgttttgcaagtctaatagaccattgagcgatttcgcaaacgtacttttaccactcccattgtggccaataatcgcaacccattcaccagcattaatctcgactgacaaatcattgagtgccaaatgctgattggactggggatattcatattttaaatgttcaacttggatgattttttttgaattcatcaacattaacccatttttcttttgaatttaaatcgcaagaatgcgaatttgataacttctattttagcatacgataggtgactttttggcattgaccgttctaaatttaggtttgaccattattttaaagtaatttattaaaatttagtcgttaaaattgatactttcccagagttttagaaacctacttctaaaacttctgatttttcaaacttttagaagtatactggcaaaacttccgagttgcacaaatggcatgcacaacacaaaaaacgcctaacgctgtttgaccagcattagacgtttgtttatgtaaatcatcaatcgatgaaagtgccgctgacttgctaacgacaccttaggactagacttgggttaccccagcatcatgacgccctgtctcatcgatcaaatgatctaaaatcattatgtgtgattaaactaattcaataatcaccattaatgcaccgtcaccacgacgaggggctgttttaagaatacgtgtgtaaccaccatttctttcagcataacgtggagcaatgtcactaaataacttttgtaaagcagattgtacgattacagcttcttcttcttcgcgaatatcagcaatttcgttacgaacgaatgctgccgcttgacgacgagcgtgtaaatcaccgcgtttacctaaagtgatcattttttcagttactttacgaagttctttggcgcgagcttcagtcgttacaatgcgttcgttgatgattaaatctgttgtcaatgaacgtaacattgctttacgatgagcgctgtcgcgacctaatttacgataacccatgaatggagtccctccttcttactagtttattcttcagtacgtaagcccaagccaagatcaaataatttgttcttaacttcttctaaagacttacggccaaggtttctaactttcatcatatctgcttctgatttgtcagttaactcttgaacagtgttgatcccagcgcgtttcaaacagttgtatgaacgaacagaaagatctaactcttcaattgtcatttcaagcattttttctttatgcgtctcttctttttcgaccatgatttcagcatttttcgcttcatcagtcaggtcaacaaagatcgccaaatgctctgtcataatcttcgcagctaagctaatagcttctctaggactgatggaaccattagtccaaacatcaagtgttaacttgtcgaaatcgttgcgacgaccaacacgtgtactttctacttgatagttaacacgactgattggggtataaattgagtcgattggcaaaacaccaattggcatatcgtctgatttgttttgatcagcagcaacatagccacggccttttttaactgtcatccgcacgtggaaattgccgccttcagctactgtacaaatatattgatcagtatttaagacttcaacgtcgtcatcagctacgatatcagcagcagttactgttgctggtcccttaacatcgatttcgattgttttgtcttcttcaacatgcaatttaagtgctaattttttgacattcaaaatgatttgcgtaacgtcttctaggacgccatcaattgttgagaattcatgcaaaacgccatcaatttgaatgtctgtgacagcagtacctggtaatgatgctaaaagaatacgacgtaaagagttacctaaagtcgtaccgtatccacgttcaagtggttcaacaacgaacttaccgtagttagtactttcatcaacctttgtaatgtttggtttttcaaattcgatcattcttatcttttacccctttcaaaacgagaagtgtttatacgtgaacacgtttcagtttgtctcaaaatgaagcgtagcccagactaaacacgacggcgttttggaggacgagatccattatgaggaactggcgttacgtcgcgaatagcagtaacatctaaaccagttgcttgtaatgagcgaattgcagcttcacggcctgaaccaggtcctttaacagcaacttcaacagctttcatgccatgttccatcgcttctttaccagcagcttctgcagccatttgagcagcaaaaggtgttgacttacgactacctttaaagcccaatgaaccagcagacgcccatgcaatcgcattgccttgaggatcagtgatcattacaagggtgttattgaatgttgaatgaatatgtgccacaccggcttcgatatttttctttacacgacgcttacgtggtgcatttttcttgtttgccataaattataacctccttttactgattatttcttcttacctgcgattgaaacttttttgcccttacgagtacgagcattgtttttcgtgttttgtccacgaactggtaaaccacgacgatgacgcatgccacgataagaaccaatttcttgtagacgtttgatgtttaggcttacttcacgacgaagatcgccttcaactttaacgttatcaactgctttacggatcttgtcttcttgatccggcgttaagtcgcgagtccgaacgtcagttgcgacgccagcttcagctaagactttaacggcagtcgtatttccgataccgaaaacatatgttaaagcaatcacaatttgtttatcacgtggtaaatccacacctgcgatacgagccattcttgcacctcctgttaattaattagttattaaccttgacgttgtttatgttttggattagctgcgcagataatcatgacgcggccttttcgtttgacaactttacaatgttcacacattggttttactgatggtcttactttcatatcgactaacctccttgatatgatcgttacgtaggctatttaaagcgatacgtaatacgtcccttagtcaaatcataaggtgacaattcaacggtcacacgatcaccgggcaaaatacggatataattcttccgaatcttaccagacacgtgggccaaaatgattgcaccattttcaagttctactttaaacattgcatttggtaaagtatcagttactttaccttcaatttcaatgacgtcatcttttgccacgcaaaagtacccccttgtggttatgaaaattcatacagaaaaatggtgagagctctccgcactcaccgctagtgtcataccgagatattatatcacaagtatttagtttttaaaagcactgaacattagtcattaaccccagtcaggcttttacgtgaaatgacctaaaagatcacttgagttgatgactagtctttaatggtatcaagtacttttttaacggcagcaaacacgtcatcaatttcttgattaccgtctaccgtataaagcaagttccgttcagcataaaaatcaagtaaaggtgtattcatttcaatattgaccttcaatcgatttttaactgtttccggtttatcgtcttctcgttggaagaagtcatgaccgccgcaacgatcacaagtgccttccaccttagttggattgtaaagcttatggtacgttgcaccacaagagctacagataaagcgaccagataaacgatcagctaagattttaggatcaacatcaatgttaatcacgccatctaaaggcttattcaatttatcagtaatggttgctaaagcttccgcctgagcgagattccgagggaaaccatctaaaaggtaaccgactttagtatctggttgtccaagacgttcctcgacgattccgttagtgacttcatctggtaccaatgcgccttgatccatataggccttagctttgtcgccaagttcagtatggtcggccatagcagcccggaacatatccccagttgaaatatgtggaatgtgataagcgtcaacaatcttttcagcttgtgttcccttaccagcgcctggaagtcccattaacatgagattcatgtctttgcctcctaagttaaaaacaaggattcaatacttttaaacgataattgcttatcgaataaatccaacgtacttacgtttcatgagtaacccttcgagttggcgagtactttccagcgccacaccaacaacgattagtaaactagtcccacctaaaccgattgattgaggtagaccacctaggtttgctgcaagttgtggtaataatgcaattacccccaggaacaacgcgccgacggtcgaaagacgcatcaatacgccagaaagatatttctcggtacctttacccggccaaacacctgggatataactcccttgtttggtcaagttctctgcgactttttcaggattaacctgaacaaacgcatagaagaaggtaaagagaacaatgagcaccgtataaacaattgaaccagtcatggtttgcatactgaagatattggataagacttggaaccaagtatcttcactgtggcttgcctgaaaggccatcaaaattgtttggggtgtcataataaatgaacttgcaaagataacgggaatcacaccagcaacattgacctttagtggtaggtaactattttcacctgcaccagcttcacgacgtgtatattgaattggaattttacggttcgcttgttgaacccacgtgacgaagatgacgattgcgattaccgcaacaatcaagacgaccacgaataaaatacctttccacatatcagccgctttagcatttaagatatgttcttggacgatttgtttcaagccacttggtagacgtgcaataatccctgcaaagatgatcattgacaccccattaccaagtcccttgtccgtaatctgttcacccaaccaagtaatcaacatcgtcccacccgttaagatgatcccgatactgacgaaggtcttaatactaggatctttcaccaagcccatttgacttaatgagttaaacccagcagtaatcccaatcgattggataaacgacaagatgatggttaagtagcgggtcacttgattcagtttccgacgaccaacttcaccttgtttgctccattcaacaaatttaggcacaatgtccatttgcaataattgaatcacaatttgggccgtgatgaaaggcgaaacacccatcgagaagatggaatagtttgccaggccaccaccactaacagtatcaagcaatgggatcaaaccagttgcgcccaccttagtcaatgcagcagcattaacacctggtactgtaatttgtgcacctaaacgataaacaatcaaaacgcccaaagtgaacaaaatcttactacggatttccttgactttaaatgcgtttcttaatgtgtttagcaattaaatcacctcaattgaaccgccagcagcttctacagcagcttttgcagcttcagaatacttgcttaccttaatgttcaattttttgtttaattcgccattcgctaatagcttaacgcctgataattcttttttgatcacgccagcttcgattaagatcactggtgtaatttctgtaccgtcttcaaaacgatttaaatcgtttaagttaacaacagcatattccttacggttgatgttgttgaacccgcgtttaggcatacgacggaataaaggcatttgtccaccttcaaagcctaagcgtaccttactacgagccttttggcctttttgtccacgtccagatgtcttaccagtacctgatgatgtaccacgaccgacacgtttacgaacgtcacgagcaccctcgtttggtttcatttcatgtaacttcatgtgtgcgcacctccttgcaagttatgttgaaattaatctttaatttcttcgactgttactaaatgtgcgagtttaaaaatcacaccgcgagttgcagcatcatctggtttgattacagaactattcactcggttcaagccaaattctttgaccattttacgttgttctggaagacgatgagcagcactttttcttaaagtaatctttaattgagccatgttcaatatcctcctagttttgtaagctttcaacagatatgttacgtaattctgcaaattgttcagcagtcttcatacgagttaaaccgtcaattgtggcacgaataacgttgatagcagttttgctacctaatgttttacttgtcacatcatcgactcctgctaattccatgacggcacgaacagcaccaccagctgcgataccagaaccttcaacggctggttttaacaagacacgaccagcgccaaagtgaccgataacttcatgaggtaatgttgtcccaactttaggaacgctgataagattctttttagcatcttcaacagctttacgaatagcttcgggaacttcttgagctttaccagtcccaaaaccaacgtgaccgtctttatcaccaacgattacaatagctgcgaaacgtagacgacgtccacctttaacaacttttgtaacacggttgattgatacaacgcgatcttctaaatctaaatgagttggatcaatgtaagtcataaatggttttcctccttattagaattctagtccgttttcacgagcagcattagctaatgcttcgatacggccgtgatataggtaaccgccacgatcaaagacaaccactttgtggccagctttaactgcacgttgtgcaactaaagtaccaacttgggtagcttgttcgcttttagttccttctgcttttacttctttatctaatgttgaggcacttgctagcgtcacacccgctacgtcatcaattaattgagcgtagatgtttttgttagaacggaacacgttcaagcgtgggcagtcagcagtaccagagatcttgccgcgaacgcgcgtatggcgtttttgacgagtcttattcttgtctggtttagtaatcacaattttcacctcttaagtatatttagcaacttacgctgctttatttaccagttttaccttctttacggcggacaatttcgtctgtataacgaatacccttgcctttataaggttctggaggacgaacatcacgaataatagctgcgaattggccaacttgttgtttgctaataccgctaataatgatcttcgtattcgctgggacttcaatgttaacaccttctggtgcttccatttctactggatgagagtagccaacgtttaatactaatgtcttaccttttaattgggtacggtaaccaacaccgattagatccaatgtcttgctgaaaccttctgtaacacccaaaatcatgttgtttaagttagcgcgcatagtgccgtgcattgcacgatcgctatctttgctacgtgtaaagttgataaggttgccttcttcgtgcatttcaatgattggattgaaatgacgtgttagttcacctttaggacccttaactgtgatgttgttttcactgtctttagtaacagtaacaccagctgggacttcgattacttttaatccgatacgactcacgttacgacacctccttgttttaaagtttgattaccatacgtatgcgagaacttcgccgccggcagctttttcgcgagcttctttgtctgttacgacgccgttgcttgttgaaataatagcaatgcctaaaccgttcaataccttaggtacttcggtagctttgacatagttacgtaagccaggttttgagatacgtttcaaaccagagataacacgttcgttattcttaccatacttcaagaatacacggatgataccttgtttgtcgtcttcaatgacttcgtagtcgcgaatgaaaccttcgcgttttaagatttcagaaatttctttcttcatgcgtgaagcaggtacttctaaagactcatgccgtaccatgttagcgttacggatacgagttagatagtctgcgattggatctgtcatgaccatgtggaattaacctcctttattgaatctttatgattaccagcttgcttttttcatgcctggaatttggcccttatgagctaattcacggaggcaaatccggcaaagcttaaacttacgataaactgaatgtggtcgtccacattgttcgcaacgagtatattcttgtgttgaaaattttgctggacgatgattcttaacaactaaagattttttagccaagaaattgacctcccttattattttttgaatggcatgccgaattgtgttaacaattcgcgtgcttcttcatcagtgtttgaagttgttacaataacaacatccaaaccacgaacgcgatctaccttatcataatcgatttcagggaagatcaattgttcgcgtacacctaatgtataattaccgcgaccatcaaatgattttgcgctaacaccgtgaaaatcacgaacacgaggtaaagatacgttaactaatttatctaagaaatcgtacattctttcgccacgtaatgtaactttggcgccgattggcataccttcacgtaaacggaagccggcgattgattttttagctttagtgattaaaggtttttgacctgcaatcaaagctaattcttcaacagctttgtctaagttcttagcgttagaaacggcatcaccaacacccatgttaagtacgatcttttcgatcttaggtacttgcatgcttgaagtgtaattaaacttttcaattaatgctggtgtcatttctttaacatatttttcttttaaacggttagtcatgtaaaaagtgcctcctttccccaaaagattatttatcgattgattctccagttttctttgacacgcgtacttttttaccatcaattactttaaagccaacacgagttgcttcgttagtagatggatcaattagcataacgtttgacacgttgatgctagccgctgtatcaacaatcccaccattaggattttgagcatttggcttaacgtgctttttaacggtattgataccttcaacaacaacacggccatctttaggcattgctttgatgatggtaccttctttacctttatctttaccgctgattacttttactttatcaccagttttaacaaacatgatatacgcacctcctttgtagtctgcaattatagaacttcaggcgctagggaaacgatcttcatgaaatcattgtcacgtaattcacgtgcaactggtccaaagatacgtgttcctttaggagtcttatcatcattgatgataacagcagcgttttcgtcgaacttgatgtaagaaccgtctacacgacgagcccctgacttagtacgaacgataacagccttgacaacttcaccttttttgacaacgccacctggtgttgcttgtttaattgttgcgacgataacatcaccgatattggcagtcttacgacctgaaccacccaaaactttaatggttaaaatttcacgggcaccggagttatcagcaactctaagacgactttctgtttgaatcactataggtcctccttccgtcacttagtttaagtaacgatttagataataactgctttttcaacgacatctaataaacggaaccgttttgtacgagataacggacgagtttccatgatacgtacgacatcgcctacttttgcttcgttgttgtcatcttgtgcataatattttttagaatacttaacacgtttcccgtaagtaggatgtgtcttataagtttctaccacgacagtaattgttttttccattttgtcagaaataacacggccttggtacactttacgatggttacgactttcgctcaaagtaaatagctcctttccatttattatttgttaagttcttgttgacgtaaaacagttttgatacgagcaatgttctgacgaacttgctttaagcgtgcggtattttctaattgaccggtagcttgttggaaacgaagattgaacaattcttctttataagcttgttctttcttaagcatttcagcagtggttaattcactgatttcattagccttcattagattcgccacctacttcctcacgttttacgatcttagttttaactggcaatttgtgtgaggcaagacgtaatgcttcgcgagctacttcttcagaaacgccaccgatttcaaacatgattttttcacgttttacaacggcaacccaacctgcaggagcacctttacctgaacccatccgaacgccgacaccttttgcagtgtatgatttatgagggaaaattttgatccatactttcccaccacgtttcatgtaacgagtcatagcaacacgggcagcttcgatttgacggttggtaatccaacttgattccaaagcttgtagaccgtattcgccaaaagtgacttctttgccacctttagcagcaccgcgcatcttcccacggaattcgcgacgatgttttacacgtttaggtactaacatgtttatttccctcctttcatattgttattagctttagcgggtaaaatttcgccccgataaatccaagtcttaactcctaatttaccgtaagtcgtcatggcttcgtcccatgaatagtcgatatcagcacgtaacgtatgcaaaggaacagttccttgagcatgtgtttcaatacgtgacatatctgcaccgttcaaacgaccagcgacttgagttttgatacctttagcgccagaacgcatagtgcgttgcatagcttggcgttgtgcacgacggaaagcaacacgtgcttccaattgacgagcaatactttcgccgactaagtgagcatctaaatcaggtttcttgatttccacaatgttgatgtgtactttcttgcctgttaagttatttagttctttacgtagattttctacttcagaaccgcctttaccgattaccataccaggtttagcagtatggattgaaacgttgacgcgatttgcagcgcgttccgtttcaatggtagagacggaagcgtcagctagtttagtgttaatatatttacgaatcttaagatcttcatgtaaaaatgttgcaaaatctttttctgcataccatttagcgtcccaatcacggattacgccgacacgaaaaccggttggattaattttttgacccacgcgatatccctccttatgcttctttttctgatacaactacagtgatgtgacttgtacgtttgttgattggtgatgctgagcctttagcgcgaggacgaaaacgtttcaatgttggtccttcgtttgcataagcttcagtaacaaccaagttttctgcatctaagtcgtaattatgttctgcgttagcgattgctgacttcaaaactttaatcacaactggagaagcagctcttggtgtaaattctaaaattgcaattgcttctgcaacattcttaccgcgaatcaagtccataaccatccgtactttacgggcagccatacgaactgacttggcgctagctgttgcactagtaatttgatctgccattggattcatcctcctttctagcgtgctgttgttttcttatcgtctgtaccatgaccatggaaagttcttgttggtacgaattcgcctaatttatggcctaccatatcgtctgagatgaaaactgggacgtgtttccgtccatcatatacagcgattgtgtagccaataaagctagggaaaattgtcgagcgacgagaccaagtcttgatgacttgtttcttttcgctatcagcttgtgcttcgacttttttcatcaaatgcgcatcagcgaaagggccttttttcaaactacgactcattatgaaacctccttcgaataaaaagtacgatagacttatctgatttaagccgcttgggctttagataagttcaatttaaattgattatcttgatttacgatgacgaataataagtttctctgaacgagccttactactacgagttttcttaccaagcgtcttcttaccccatggagacataggagaaggacgtccgattggtgctttaccttcaccaccaccatgaggatgatcgttaggattcattacagacccacgaactgtaggacggatacccatccaacgtttacggccggctttaccaattttgatcaattcatgttggccattaccaacagtaccgattgtagcgcgacaagtaacaaggatcatacgagtttcgcctgaagtcaaacgtacaattgcatatttgccttctttaccaagtaattgagctgatgtaccagctgaacgaaccaattggccgcctttaccaggtttcaattcgatattgtggataagtgtcccatcaggaatgttagataatggcaatgcattaccaactttaatatcagcatccacaccagattcaacgatcatgcctacttcaaggcctttaggggcgatgatgtatgctttgataccatctgggtattggatcaatgcgatatttgatgtacggtttggatcgtattcgattgacttaacagtcgctttgataccatctttaatccgtttgaagtcgataacacgatatttttgtttatgaccaccgccacgatgacgtacggtgatatgaccgtgcgcattacgaccagcagtatggctttgggattccaacaacgtcttttcaggggttgtcttagtaatctcagcaaaatctgagctggtcatgttacgacgaccgtttgtggttggtttgtacttaataattcccacgtgtgttccctcctataattattactttaatttaatgttgattaatcttcgaaaatcttgatttcttttgaatcagcagttaaggcaacgattgctttacggcgttttttagtatagccagaatagcgaccttgacgttttaacttaccgcgaacattcatgatgttcacgtttttaactgatacaccaaagatttcttcgattgcgtaacgtacttgtgtcttgttagcatgtacattaacatcaaacgtgtatttcttgtcgtccatagcagccattgaagcttcagtaactactgggcgtaaaataacatcgcgtgcttccattatccaagcacctcctcaatcttagaaagagcagcttgagttaggattaatttttggttgccaacaacgtctaatacgttgataccttcagcgggaacaactgttacgttaggtaagttgcgtgctgatagggcagcaaaatcattgccttcttcaagaactactaatgctttagtattaacatctaatttgttaagtacttctgcgaattctttagtcttaggtgcatcaaagttgaatgcatcaacaacgactaaatcattatcgataaccttttgtgaaagtactgacttgatagcaagacgacgtactttacgaggtaatttgtaactgtatgaacgaggagtaggtccgaagacgataccaccgccacgccattgtggtgaacggattgagccttgacgagcacgaccagtacccttttgacgccaaggtttacgaccaccaccgcgaactgcagaacggttcttaacggcatgtgttccttgtcttaatgaagcacgttgcatgatgattgcatcaaacacaacgttttcgttaggttcgatagcccagatagtgtcgtttaattcgacgcttccgttttggctaccatcttgtttaaataatgttacgtttgccattggttaaatcctcccttctcgaattatttgttagctttaacagctgttttaattgtaatcaatgagtttttagcacctggcacgttacccttaacaaggataacgttcttttcaacatctgtgccaacaactaataagttttgaacagtccgttgatggttacccatgcgacctggtaatagtttgcccttaaacacacggttaataacggcacccattgaaccaggacgacggtgaaaacgagaaccatgactcatagggccacgagattgtccgtctttcttaatgttaccttggaaaccatgacctttcgttacaccagttgcgtctacgacgtcgccggctgcgaaagtatcaactttgatttctgttcctacttcgtactctcctagtgcaacatctctgaattctcgaatgaagcgcttaggagtagtatttgcttttgctacatgacctttagcaggtttgtttgacaagacttcacgtttatcttgataaccgacttggatggcttcatagccgtctgtttcgttagtcttaacttgtaagacaacgttcggtgttgcttcgataactgttacgggaacaagttcaccgttttcgttaaaaacttgtgtcatacctacttttttacctaagattccttttgtggtcatggtaacacctccaattttttgatttagtatttaactattaaagcttgatttcgatatccacaccacttggtaagtcaagtttcatcaatgaatcaactgtcttaggtgttgggttaacaatatcgattaaacgcttatgagtacgcatttcgaattgttcacgagaatctttatgtttatgtggtgaacgtaatacagtataaagtgtccgttcagttggtaatgggattgggccagagattgaagctcctgttctctttgctgtttccacgatcttatcagctgattgatccaaaatacggtgttcgaatgctttcaaacgaatacgaatcttttgttttgccatgtttttccctccttcgtctattttaaaagtagactagctccgtgaaaatttttccggcacgcccgcccatggcaaagcggccgggtgtgtcgcaacctctcacatcttagctacttaggaatctttcgaccccctcgtgcgcaaacttctgttatagaaatagcaccttatctatcttacaagatgggccaaaattatgcaacccttttttgctgatttatcaaagtttttcataaccttttcataaaaacggatagtggtttatcgctagccttcgccctacttttcaggtacacttagaccaattaaatattcgctaggaggcttttacatggtagctcaagcacttttaatcatcgattatacaaatgacttcgtcgccgacaacggcgcgctaacggccggtgcaccagcccaggcgattgccacttcaatcgtgacgctagctgatcaatttttatcggcgggcgacgacgtgattttgccgaccgacttacacgtggctaacgatccccaccatccagaaaccaaactcttcccaccacataacttagctaatacttgggggcgcgaattttacggccccctcgctacttggtacgctgcccacaaagatgacgagcacgtctacgcctttgccaagaaccgctattctgcatttgccaatacgaatttagataattacctacgcgaacgccacatcactgacttacatttaacgggcgtctgcaccgacatctgcgtcctacacaccgccgtgtcagcctataacttaaactatccgttaacgatccacgaacaagccgtcgcaaccttcacccccaacggccaagaatgggccctcgcacattttaaggatagcttgaatgcaaagatagagcgttgattgagcgtttaaaccttgagcataacctaagaatctgcattatgatttgtattttaatcataatgtagattttgtagttaggcggaaaggtttgctcaagaagcgcgtttagagcgctgattgagttggtcagactttgaggattaacctaagaagtccaattgtggttcgatttttagccatgattggacttctgtcgttaaccagaaaagactgctcgagaagcgcgtttagagcactaatcaagctaattatccccaaaaagctaaccactttcttctatataataatataacgaatattattcttcaaaaaaaagctgtttgtcgtgttgattgaaacttctcagccacggtgttataatgaagccaacaaaaaaggaaccgtgcgtcaacacgattccacgcagaccgctaaagacggttggcatcaatatcacaatctaatagccttgcgaactctgccaaaagttatcgcaacggttatttttttatcgttttaatcagcgtttgccacgcaatcaccagtttagtaacggcttttgtcagtttttcaaccgccaaaattaagaccgtcacgccactaataaccaccagcgcactccccaaaaacaactaggctactcccttctgcagattccggatttcatgcaatcgctgcataagcaccaccaccctacattcagttttgccaaccgccactaacttcttgcttgatacgcattgtatcatattgagcaagtttaaaacaccgtattccagctagctatttctaacataaaaatagacccgctttgcagcgagtccgaggagtgtatgaaaaaagagttttgtcagttctttgccagggcggtggcaaatcgagttagcgggggttgaacccgcatcggccgtcattatattttctgggaggaatttcaaatgaatggaccagtcctaccgattaaacgataactcattggtgttgctcagccagccactctaggaaagcggccaactgtttgaaaaacactttatctttcagattatttcttgggaggaattcatctgatatatatagaataacaacgagatgtgaacgaattgtgaactttcatttataaaactgtaaaattcacgattaccatttaattaatccatactcattaacgccacaaaaaaaggccccgcagatgcgggaccttttttaatccaacagaagtcatcagatcaacgggtccaattaattattggccaccatttttcttgataatttcttcttggatgctcttaggaacagctgaataatgatcaaatgtcattgtaaatgtcccacggccttgtgttgctgaacgtaaagtcgttgcataaccaaacatttctgataatggcaccattgcgttaacaagttgtgcattaccacgggcttccataccttcaacacgtccacgacgggcagtaatttgtcccataatatcaccaagatattcttcaggagcaatcacttcaaccttcatgattggttctaggatttcagcgccagcttttttagcagcatttctcaatgccattgaagcagcaaccttaaatgcagattcattagaatcgacatcatgataactaccatcatatagcttagctttaacgtcgatcaatgggtagccggctaagacaccgtttgccattgattctttcaagccttgttcaactgatggaatgtattcacgaggaacaacaccaccgacgatagcatcttcgaattcgaagcctttaccctcttcattaggtgtaaattcaacccaaacgtcaccatattgacctttaccaccggattgacgaacgaatttaccttgtgcagaagcttgtttcgtgaatgtttcacgataagcaacttgtggttcgccgactttggcaaccactttaaattcacgtttcatacggtcaaccatgatatccaaatgtaattcgcccatgccggcaattaatgtttcgccagtttcagggttcgtttcagctttgaatgttggatcttcttcaccaagtttttgcaaggcaagatctaacttatcacgatcttcttttgattcaggttcgatagaaacttggataacgggatcagggaattccattgattccaaaattaatggatgatcaatatcagtcaatgaatcaccagttgtcgtgttcttcaaaccgattgcagcagcgatatcccctgagaatacttcaggaatttcgttacggtgatttgaatgcatttgtaataaacgaccaacacgttcacgtttgtctttagtagcgttcaagacgtatgaacctgattgaagtgtccccgtataaacacggaagaatgttaaacgaccaacgaaaggatcggtagcaatcttaaaggctaaaccagcaaatggtttgtcatcgccagccatcaattcaacttctgtatcaggatcttctggatcagttgctttgtaaggacgtacttctaatggtgatggaaggtaatcaacaaccccatccattaacatttgaacacccttatttttaaaggctgaaccggcaaatactgggaagaatttcaaatcaatcgttgcttgacgaattgcttttttcaattcatctttagtgatttcttcgccttctaagtatttttccatgatgtcatcatttacatcagcaacagcttcaactaaagatgcgcgacgttttgttgcttcttctaggtagtcagcaggcacttcaacagtatcccacttagcgcctagttcatcttcatcatagatatcagcttgcatttcgatcaaatcaataacgcctaagaaatcatcttcagcgccaattggcatttgaacggcatgtgcattagcttgtagacggtcttcaagagttgtcattgaataatcaaagtcagcccctaatttatccatcttattaacaaagacgatacgtggtacaccataagtagttgcttgacgccaaacattttcagtttgaggttcaacacctgattgagcatctaagacagtgatggcaccatctaagacacgcaatgaacgttcaacttcaattgtgaaatcgacatgtcctggtgtatcaataatattaactcggttacctttccattcggcagttgttgctgctgatgtaatagtaatcccacgttcttgttcttgttccatccaatccatttgtgaagccccttcatgggtttcaccgattttatgaattttaccagtataatacaagatacgttcagtagttgtcgtcttaccagcatcgatatgagccatgataccgatattacgagttttgtctaacgggaattcacgtttgtttgccatagtgaatagttactcctctcgaattatcaaatattacgctaaagacaacaagaggccattatatgacttgttgaaaagcatacaatggccatccttgttaatcttaccagcgataatgtgcaaatgcgcggttggcatcagccattttatgtgtgtcttcacgtttcttaacagcagcaccagtgttattggcagcatccataatttcacgtgcaagacgttgatccatcgtatgttcgccacgtaagcgagcatagtttactaaccaacgtaaacctaaagttgtacgacgttctggacgaacttcaattggcacttggtagttagaaccaccgatacggcgagctttaacttcaagtactggcatgatgttgttcatagcttcttcgaaaacttccaatgggtccttgctagtttcttctttaataatatcaaacgcatcatataagatggttgatgcagtcccacgtttcccatcaaccattaaccggttgattaagcgtgaaaccaatttagaattgtacattggatcaggtaaaacgtcacgtttagcaacatagccttttcttggcatcctgataacctcctcaagattttaagtccttgaagtaacacacagtgtcatttaaacttcaatacgacttttatattttttattgtgtgttattttttaggtctcttagtaccgtatttagaacgactttgcatacgaccatctacaccggcagtatccaaagcgccacggataacgtgataacgaaccccaggtaaatccttgacacggcccccacggataagaacaacactatgttcttgtaggttatgaccaataccaggaatataagctgtgacttcgattaagttagataaacgcacacgcgcatacttacgtaaagcagagttaggctttttaggtgtcatagtcccgacacgagtagcgaccccacgtttttgtggtgctggattatctgtagcgattttcttcatactgttgtagccaaagtttaatgcaggtgcatcagactttgaagttcttgatttacgacccttacgtaccaattggttaattgttggcatttgaaggttcctccttccttgagctgaaagttatttttaagtttaagtccacacatccaggcggttctttttttttgataaaaaaatggcaacctagttgcgtgaattgtaatgcatttttaaacgtcagtcagcatgatctgatttccagaaaaacttccgtaaaaagcaccttcattagattatcatcattattcagatttgtcaacacgattttaaccctcttttcagaaaaaaatagccgtattcagggtaactattgattaaggagggttcattatgcttaagtctttattactattttattgcggtgcttgcatcgcctctttcatcaccgtcatctgttggcgttggccactcggacggtccatcatctggccgacttcgcattgcgattggtgtcgccaccagattgcttggtacgatttattcccgattgtcagttacctgattttaaaaggtcattgtcgtgattgtggttttccgattcaccgcggctttttctacagcgaaattgctggtggctgcttatttgtactgctattatcgcgagcatggccttggcaattgatttatttaatcgtgctgctatactgtctcagtttaatcgacctcttacatagcgtcatgtatcctggtccgacactaacggcgatggtgccgctctttattagtttctggtctaattaccactggctggccgcgttcttaatcggtagcgcgctcgcactactcgcttattggacagacgcgtttggtttcggcgacgtcgaactactcacgattctaactctgtggttcggcttagaattcgtactgcaaagtttattagccggttgcatcctctgcttaatcggttacgccatcaaaaaaatccggcgaccacacagcattttgcgtggcgaccagattccgtttattccctatattagtatgggggtggtggtggtcatggcgttttgaaacgcgcaagtgcccacagcttcttgtgcttagctacgtttcgcaaacaaagtccacaaatcggactttattcacggaactaggctaatgctcagaagctacccgtgagggctcacgctctattctgaaacgcgctatctcaagcaacgctttccgcctaactacaaaaatcccttatggttgaagaacaccataagggattttttagattatgctcaagcgttaaccgcttgagatagcactctattcttttgtttcttcttgtttcatttgggcttcgatgtcactgattgagtagacattttctgagacggcaccaactgttttaggttccatatgacggtacttcgccataccagtaccagctgggacgatcttcccgatgataacattttctttcaaaccaagtaatggatcactcttaccgcggatagaagcatccgttaagacacgagttgtttcttggaatgatgcggcagataagaaactattggtttccagtgaggctttggtaataccaagcaagactggacgacaagtagcaggaacgccaccgctaataagtgtttcgtggttacgatccgtaaattcgctaatgtccattaacgtaccaggtaagatttcggtatcacctggatccatgacacggactttacgtaacatttgacgaaccataacctcgacatgtttatcgccgatttcaacaccttgcatacggtaaactttttgaacttcatgcaagaggtagttttcagttgataagacgtcacgaactttgattaattgtttgggatcgacagaaccacccgtgattttttcaccacgacgaacgtgatcgccttcgctaacaatgacgttagccgtataaggcacactatatgaacgtgtatctgtttcgccttggattgtaatttcacgactatgttcagccggattttcttcaaccgcgacaacttcaccagtgacttcagtgattgatgccaaccctttcggattacgggcttcaaaaatttcttggatacgaggtaaaccttgagtgatatcttcaccgccggcaaccccaccggtatggaagttacgcatggttaattgcgtaccaggttcaccgatagattgtgctgcgacagttccgactgcttcaccaacttcaacttcttcaccattagccatgttacgaccgtaacatttcttgcagacaccgtgtttggtgttacatgtgaagaccgaacggattgtgacattttcaacgccggcatcaacaactgcttgcgcaagatgttcatccattaattgatttctagcaacaatcacgtcacctgatttaggatctaaaatggctttcattgcacaacgaccaacaagacggtcatacaacggttcgatcatttcatttccttcatgaattgagtggatgagaagaccgcgatcagtcccacaatcttcttcacgaataataacatcttgagcaacatcgaccaaacgacgtgttaagtaaccagaatcggctgtcttaagggccgtatcggtcatccctttacgggcaccatgggtagacataaacatttccatgacagaaaggccttcacggaagttcgatgtaacgggaacttccatcatcccaccattcggtgcggccatcaacccacgcataccagcaagttgcgtaaagtttgagatattaccccgggcgccagaatcagacatcattgagattgggttggttggatcaaatgcgtcgattaatcgttgttggatatcatctttagcatcgttccaaatttcaatcacacgtgcatgacgttcttcatcggtaatcaaaccacgacggaattgtttagaaacggtcgtgaccttcttatgcgcttcatcaacgattgctttcttttcaggcaattgtggcacatcggcaaccccaactgttaagccggcatgcgttgcttgagtgtaacccaaggtcttcatgtcatctaacaaatcagaagtccgttgtactttataaaccttaaagacttgcgcaatgatgtcacttaagaaacctttcttaaatggcaaaataacgggagcagtcgctaggtagtcatgaatgtcttcacctttttggatgaagtacttatcaggcacaccgtggactaagttatcgttagtaggttcgttcaagaatgggaagtcagcaggcatgatttcgttgaacaatgctttaccaacactcgtcatcataatttgatgacgttgttcgtcagtaaatggtcgttcagtcatgctagcaacggataacccaatccgactgtgtaaatgaacgtggccagtttgataagccatgatcacttcgtttgtatctttaaagatcatgccttcaccaagacgttctttttgttcaagcgttaggtaatagttacctaacacaacatcttgagaaggggtaacgattggcttaccatctttaggtgccaagatatgatgagcggcgagcattaacattcttgcttctgcttgcgcttcgtcagataaaggcacatggattgccatttgatccccatcgaaatcggcattgtaggcttcacaagctaatggatgaagacggattgatttaccatcaaccaagattggttcgaaggcttggataccaagtcgatgcaatgtaggggcccggtttaatagtactgggcgttccttgataacatcttccaaaacgtcccaaacatcgtcatcttggcgatcaattttacgtttagcgttcttgatatttgaggccatttcgcgtttcactaattggtgcataacgaacggtttgaataattcaagcgccatttcacgtggcaacccacattgatagaacttcaacgtagggccgacatcgataacggaacgaccagaataatcgacacgtttacccaataagttttgacggaaacgtccttgtttcccttttagcatatgtgacaatgacttcagtggtcggttaccaggtccggtaacgggacggccacgacggccattatcaatcaaagcatcaacggcttcttgtaacatccgtttttcgttttgaacgatgatgtttggtgctaataaatctaataaacgtttcaaacgattatttcggttaatcacccgacgatacaaatcattcaaatcagaagtggcaaaacggccaccttccaattgaaccattggtcgtaaatctggtggaataacgggaacggtatccatgaccatccattcagggctgttccctgatttacggaaggcgtctaagatatctaaacgacggatagcgcgtgttctcttttggccttgtgctgatttcaagttttcctttaattcagcaacttcgccttcaagatcgacatcgcgtaataattccttgatggcttcagcacccatcttagcgttaaacttgttgccaaattcttcacgcttttcacgatattcacgttcggtcatcaattgtttcttttccaaggctgtatcgcccgggtcaatcacaacgtatgatgcgaagtagataatttcttccaaagcacgggggctcatgtctaagacaagacccatccggcttggaattcctttaaagtaccagatatgagtgacaggtgcagcgagttcgatatggcccattcgttcacgacgaactttagaacgagtcacttctaccccacaacggtcacagacaattcctttataccgaatccgcttgtacttaccacaagcgcattcccaatcttttgtaggtccaaagatgcgttcatcaaaaaggccatcacgttcaggttttaaagtacgatagttgattgtttctggctttttaacttcaccatatgaccaactacgaattttatctgacgatgctaaaccaatttgcatgctttcaaacttattgacatctatcaaagggccgacctcctcattttttatagaatggtaaagcagcgcgctttactaatttgaattaattagaacactcaattattcggctgaaggatcaactgggtcaacgttagcggccgctcgtgctttttcagcttcttcttgtgctttcttttcttcttgttcttttgcgtatttagataaggcatcaacattgacaatatcgtcatcgtcgtcatccatatcacgcaattcgatttcttctttattgatatctaagactttcatgtctagaccaagtgattgtaattctttgaccaagacccggaatgattctgggacacctggttttggaattggttcacccttgacgatggcttcgtacgttttaacacgaccaaccacgtcatcagacttgtaagttaagatttcttgtaaagtataagcagcaccatacgcttcaagtgcccaaacttccatttccccgaaacgttggccaccaaattgcgctttaccacctaagggttgttgcgtaacaagtgagtaaggtccgattgaacgcgcatgtaacttatcgtcaaccatgtgggctagtttcatgtagtacatgaccccaacagagacccgagtatcgaatggttcaccagtgcgaccatcataaagcacactcttaccatctgaaggcatgttagcttcacgaacagcatcccataaatctttatcttgcgcaccatcaaagactggtgtcgcaacgtggatacctaagttacgagcagccatccctaaatgtaattcaaggacttgcccgatattcatacgtgaaggcacacccatgggactcaataagatatcaactggggtaccatctggcatgtatggcatatcttcttcaggaacaacgattgaaaccgtccctttgttaccatgacgtccggccatcttatcgccgacttgaatcttacgtttttgagtaatataaacgcggaccatcatgttaacgcctggtgataattcatcgccagcttcacgcgtaaagattttaacatcttggataatcccgccgccaccatgaggtaccttaagggaagtatcacgaacttcacgtgctttttcaccgaagattgcgtggagtaaacgttcttcagctgataattcagtaacacccttaggcgtgactttaccaactaaaatatcaccgtctttaacttccgcaccaatccgtacaatcccaaattcgtcaagatcttttaatgaatcttcaccgacatttggaatttcacgagtgatttcttcaggtccaagttttgtatcacgtgcttctgattcgtattcttcaatatgaattgacgtatacaaatcttctttaaccaaacgttctgaaagaacgatggcatcttcatagttatacatattccaagtcatgaaagcgatcaatgggttttgacctaaggctaattcgccattttccatagctgggccgtctgcgataatttcatcaacatcaacgtgatcgcctttagcaacgattggacgttggttgtagttcttacccgcatttgaacgacggaatttcattaattcatatttgtccaatgaactatcttcacgacgcacacgaatttctttagcatcaacgtattcaactgttccgtcatgtttggcaagcattgcaatcccagaatcatgagcggctttgtattccatacccgtcccaaccaatggtgcgtgaggatcaactaaaggtacggcttgacgttgcatgttggcgcccatcaaggcacggtttgaatcatcattttccaagaaaggaatgcaggctgttgcgacggcaacaacttgtttaggtgagacatccatgtaatccaatttatcaattgatgtttcgatattgtcatctttgtaacgtgccaagaccgtttcttcaacgaatgacccatcatcatttaatggtgagttggcttgggcgatgacgtaattatcttcttcatcggctgttaagtagtcaatcttatcagtgacatcatgggtatcccagctgacacgacgataaggggtttcaatgaaaccataacggttaacaacggcgtaacttgctaaactattaatcaacccgatattagggccttcaggcgtttcgattgggcacatacgaccataatgggtataatgcacatctcggacttcgtaaccggcacggtcacgagtcaaaccaccaggtcctaaggcagatagacgacgtttatgcgttaattcaccaagtggattggtttgatccatgaattgtgacaattgagatgaaccaaagaattctttgattgaagccacaactgggcgaatattaattaattgttgaggtgtaatagtacttgtatcttggattgacatccgttcacgaacaacccgttccatccgtgataaaccaattctgaattggttttggagcaattcaccaactgaacgaatccgacgattacctaaatgatcaatatcatcggtattgccaagaccttcttgtaaattgaagaagtagttcattgatgccaaaatatcagcaggaatcacatgtttaactttagcgtcaatatgaccgttaccgatcatgttgatttctttgtctggcgttttttgtgaataaactttaatcacttgtaacgtcattggttcagctaagacaccttcatcagctggttggtaagtcaccgtcttgaaatcttctttgtctaaataaggtgacaaagtatccatgacttgacgatcaactactgtatctttggcagcaatcacttcacctgtatcgggatcagccaatgtttcagccaatgtttgacccaatagacgtgtctttaagctcaacttcttgttgatcttgtaacgaccaactgacgctaaatcataacgttttgcatcgaagaaacgggcaaaaagtaatgaacgtgagctatcagccgtcttaggttcgccggggcgaagacgttcgtaaatatcttttaaggcttcttcagttcttgaatcatcagtattcttatggatatctttttctaacgtcaacattaatgaatcgttgtcgcctaagatatcgataatttcttgatctgaaccgtaacctaaagcacgtactaaaacagacattggaatcttacgagtccgatcgatccgcacgtaggcaatatctttggcatctgtttcaaattctaaccaagcaccccggttaggaatgacggttgtgccgtaagttgtccggctattcttatcaattgaactattaaaataaacacctggtgaacgaactaattgagaaacgataacccgttccgcaccattaataatgaaagtcccttggtcagtcatcaatgggaaatcgccaaagaagacgtcttgagatttaatttcaccagtttcgtggtttgttagtcgtaaagtaacgtgtaatggtgctgaatagttggcatcatgttgacgtgcttcttcaaccgtgtatttcggttcaagtagttggtaaccaacgaattctaatgataaattaccagcaaaatcgtcgattggcatgatgtcctcaaacatttcacgaagcccttcatctaaaaaccattgataggaattagattggatttcgatcaagtttggtagttccaacacttctttaatccgtgcatagcttctacgggtccgatgtttaccgtaatttactaagtgtcctgccaaattgttcacccctctataaagttttccgtagaactcaatattacaaaaagatgacaaatgttaaatttaaattacatcgccaaattgatgcgtttttgagcagaaaaaaaacaaaaacagttgctttgcgcgatacgaaatcggctgaactatttttgtttttcatgaataccgtgctggacaatagatcagcacaataaatttttctacggattttcgcagttacttgttaatatacacgcctttttcagaaaagtcaattaacctatttcttattaaagacaaacgtattattgtagaatttagaattttctgacaattcattagtcactttctttaacccttttttctcaatcaatgttttttgattagaaagtagatttgtgcctagccctaattgattgcccttaattttaacacccatcgctgctaatgttgttgggaacatatccattgtactaaactgccggttcttcgttttaacagttgtcgttgtcttaggcgcattcaaaaccagattgaacgtatgccgacccgattcaggaatcttcttataatagttcacatccatccccagatgatcgccatccacaataatggttgtattcttatagaaggattgcgtttttgcccatttaataaattcaacaatctgatgatctgaaaaagcaatcacgttagaatattgattgctatattgattgggcacatccttttcaacgtaacccccaatatggtgagtgttagctgtcagcatcgttaaattaaacggcttattcgattgacttaatttagtcgcatcttctttagcgtattcaaataattttgaatcttcatacccccaccaaactttgtaatctttcgaaactcgtccggtcttacgagctgttaataaatcatcaattttaacattgccatgttgtgtaaataacgtccgtcgaccaccgaacgtcgcatcggaaccaaataaagcgacttggttatagccttgatcggctaaaatatcggttaacgtcgtcatgcctggtaagaactgggcgccttcaccagtcccataatcattaccgtcaaccggttccttcaagggcatgcctgcagtttgagcaaccattcctgcaatcgtccaaccagttccgggtaattgttgtgcaccaccaaattccttatccgtattcgagaaatgaattccctcttcttcagctaatgcggttagctctggtaataaattctcatccatctgtccgccaagcactttagaagtcgccgttgattctaatgattccgcgtaaatatagattaaattgcgtttttgtttcggaaaggtcaacttatcttcggtcggcttaacgtagttattttcgataaacgctgaatccgaagtaaagtactgataaaaaccaaccgcattaattttgaccgccgcaatggtcgttaaaattacaaaaatcaagacactcggcaatatgacataccggccaattaattgttttttgaaaagtggttttttaagctgacaggtaattgcaaatcgccttaagtaaactaaagccaccgctaaaaccactaacagcacgagtgaccctaataatggacccatgatgaaggagctaatgaaattactatcgacaccttccataggttgccgtaaattatacacaatctgttccggtgtcaacaaaccgaaattctgatttgcccagttactagccactaaaaagaaataggccagcgctagtaaaaaggcacttactaaactaccataaggtcgaccaggataatcgacgaattctaaatcgatttgaatgaatcgttttaaaaaccaatcaatcccaattaaccctaattgaatgagtgtcactaatactacaaatttaaacgtaaatgccggttgaaaaaggccatccttcaggctaagccaattaccaaataatagcttaatcgcaacaaccgctatccctagcgtcagcgcgcagtttaaatatagtttaaataatagccgaaaattttgtggttgccgtttaatgattgttactaataacggtagtattaccaacaaatagcaagttgcaataaataacattcttaatactccaatctatcaaattaataacacatgtttctactatactgcaattattaacggtaatcgagactcgttcatcaaatgattgatattcttaattaaattaactcaatatcaattgatcccttaacccattatttacaattttacgacacgacctttacacgaactagtagtgaacctttacaatcgctggctatactaaaggtatcaactcaatatagttcttcaggaggaatttagtatgaaacgatttggtgcaacgttattctcaattggggcaattgctttagtattagctggttgccaaggtaaaaagacatcgcaggtgggcacagaagcccaacccgttaaaattacggcagtcggttcaaccgcactgcaaccactcgttgagcaagctggcgaagcctaccaaaaaaacaataccgatgtcaatatcaccgtccaaggtggcggttctgggactggcttaacacaaatcagttcaggcaacgtgacgttaggcaactccgatatctttgctgaagaaaaagacggcatcgatgctaaaaaattagtcgatcataaagtcgcggttgtcgcaatcgcgcccgtcgtcaacgaaaaactcggcatcaaatcattaaccagtgcacaattgctcagcatctttaacggcaagacaaccaactggaaagaagttggcggccccgacgaaaaaatcaccgtcgttaaccgggcgcaaggcagtggcacgcgtcaaacttttgaaaatctcggtttaaaaacgaataaagtcgttgcgagtcaagaacaagattcttccggcacggttcaaaaaatcgtccgtcaaacaccaggtgccattagctacctcgcttttccttacattaaagatggtttaaaggcggttgcgttagataacgtgcaaccaactgaaaagaacgtcacgaccaacacatggaaaatctggtcgtatgaacatatgtattcaaaaggcaatccgaactaccaaacagcgaaattcattcgctacattcaatctgaatccgttcaaaaaacgttagtacccaaattgggttacatcccaatgaccaagatgaccgttgaacgtcacgctgacggccaaattcaagatatctaaacgtattgtcgcttaaaaagccttctcccgattgtgattcagtcgggggaaaggcttttttgattgactattttatagtagaaaacgcgttccttgagcaatcttctccgcctaactacaaaatgaccattatggtaaaacccaccataatggtcatttttaggttatgctcgaagattaaccgctcgagtcacgctctgttttgactcgcgctctattcgaatacaaattgattgttgtacaattcggcgtagaagccttcttgttctaataattcttgatggctaccttcttcgattatcttgccgtctttgaggacgataatccggtcagcattgaggattgtctttagacgatgggcgatcacaaagctggtacggccttgaatgacgttatccatcgctttttgaatgcgactttccgtcacggtatcgacgttacttgtggcttcatccaaaatcaatagggctggatcggtaataatcgtccgcgcgatactgattaattgtttttggccggtactaaagagattgtcttcttcactgactttggtttgatacccatcttctagcgtttcgataaattcgtgaatgtgcgcttgtttagccgccgcaaccacttcttcatcggtcgcatccggtttcccaaagacaatgttatcgcgaatcgttcctgagaataggacggattcttgtaggacaattccgacgtgcgaccgcagactatcaaggtccatttcgcgaatatcgacatcatcaattttaaccgcgccgtgatccacatcgtagaaacggttcattaaattcatcaccgttgttttccccgaaccagtcgggccaacaagcgcaatcatctggcctttatcgacttcaatgttgacgtcatgcaaaatttgtttgcctggcaagtagctaaagtcgacgttttccatcgtaactgaacggtcaataccagttaaggtcgctccatcagttgggcggacttcatcatcttcatcgaagacttcattgactcgtcgtgcaccggtgattgccaattgaatcatactgtaactcgatgataattgggcaatttggttatagaattgttgcgagtattgaacgaaagttaccactaaccctaaggcaactgattttttaatatcaccattaacagctaaccagctcccgaagaaaataacaatcgccgtattgaccaacgacatcccctgcatcaatgggaaaatcatcccagaataaatttgccctttgagcgtggctttacggacgttttcattatggccaataaaaccatcaatcgtttcagcttgtaagctgttggtgataatcactttttgaccggtgattttttcattgatgtagccattcaacttaccgacttcatcttgttgtaaattgacgtatttttgcgctttagtgatgataatccacgccaagatgaatgaaatcggtactgaagcaaccgtcacccaagcgagttggacatcttttttaaacatcataatcaataaaccaatcaataaggctgaacctgaaacaatttgacttaaaacttggttcatcgcgttataaatattatctaaatcgctggtgaatcggcttaaaatatcgccgtcggaatgccggtcgaaatatttaatctgcatcttttgtaacttgttgaataagccaatccgcatccggttggtcgacaacgcattaatccgggaaaagaccatgctcgacacaaacgttgccgcggaactaaagacgtaaaagagaatcaacgaaacaattacttcaacgaaagcgtctttggaagcaccgctagttggcaagtgttgcgcttttaaaatttggaacttggttgcgtatttaaccaattcatttaaagcgttcccgatatattccggtgccttaacttgtaaataagtggcgataaaggtcatcacgaggatgatcacgaatgacggcttatatcgttttaaataatggtagaaaaacgtcatggcgcgtttaaattctttcatggcttatcctcgctttcctttttgagtttcgaaaatttcacgataaacatcgttgttagcgaccaattcatgatgggtgccgacaccgactaaatgaccttcatcgaggactaaaatgcgattcgcattgacgactgacgaaatcttttgcgcaataatcagcgttgtcgtctctttcaattcacgatcgagcgcttctttgactaatttttcagaatgcgcatctaacgcactggtactatcatccaagattaaaatcttaggttgcccaatcacaccccgcgtaattgataagcgttgcttttgaccacccgagaagttagcgccccgttcttcaacgggtgcctcgtaacgttcagccagtttttcgataaattcttttgattgggcgatgccagcagcgcggtccagttcgctttctgccgcatcttcgttaccgtggcgcaagttttgtgaaatcgtccctgagaataaaatcgctttttgaaggacaaatgataccgtattgtgtaaattatgttcattcaaatccttgatatcaacgccgccgattttaatttgacccttagtgggatcaaacaaacgcggaattaattgggccatggttgacttaccggcaccggttgcgccgacaatcccaatcatttcacccggattgattttaaaactgatatcttgtaacgtttcgtggtcatcatcgggataacggaaatcaacgtggtcaaattccaaactaccggctaaatcacgatcaggtacttctggatagacaatatccggattcgtatcgagaatctcttgtagccgtctcaatgaaacagccccccgggaagccatcatcatcatcatcccgcccataataatcgacatcatgatttgcattaaataattcatgaatgacgcaatcgctgcaatcgccgttggatcagtatcgactaagttgccgacgaaataaattgaagcgacaacggccaagttagcgactaacataaacgatggaatcatcactgagaaaagcatgccgacaatcgctgtatgatgttctaatttatcactcgttttactaaatcgggcaatttcgttatcttcttggacaaacgatttaacaattcgcgtacccatcaaattttctttggccagattgttaattttatcaatcaagttttgaatcgcaccaaaatgtttgcccattgaccccattgataggaaagtaatcacaaaaaccagcaccactaataggataatcacccaccagagactcggcaatgaattcatcgctaagataaaactaccgacaaataaaattggaatccgaaaaatggtttgtaacgtcatcataataacgttttgaatttgagtcatatcattcgtgagtctaaccgatagattaccgaccgagaatttttcgatattcgcaaacgagaacgtctgaatttttctgaaggtcgtttcccgcatatccgcagtcatcccctgggctgtcaccgcagaagtaatcgtattgacgatgccggcaatcaaaccgacaatcgcgatgataattaaatatattccgacttgcatgaccttatcttggtcatttttcataatggcttctaaaacatcttgcaatagtttcggttgccataaagctgaagcaactgaaacaacggttgctaataatgacaggctgaaaaccccaagatagggttttaaatgttgtttgagcatcgacatatgcatccctctttttcctaaatttgaattgtgattcaaactattgtacagtataaacgaacactgttcgggttactactgtaacaaattttaaaaacaatttcaatcaatttttctgaaaatgtaaaggggtttgactaaaatggtcaaaaaagacatttctgatacacaaatcatcaaaacagccttcaaaattctatcgattaacgggactgctgaatcactctccattcgcaagattgcggccgaattggatattagtgtctccactttttattggcatttcgctaacaaacaagcgctactccaagcgatggctgatgacgtcatggctgaggttctaattgagccttcgactgaagcttgggacgttcaaatcaaagcgattttcatggcgatttaccaaacctatttgaaatacccctacgctgccgaattgatgattttgaccgtgccagcgactaaaattcgcttgcgtttaatcaatcaattgattcaaatattactcgacgccggtttcgcgcccgataaaagtagcttagtgattgaatcaatcgaccattttatcaccggcttatttgcggatattgccaatgaagtccggcttaaaaattgtgccttaaccagtcaagataattacatgcgtgaactggttggccaaatgcaaagcatcgctcaagaaaatcattatgatgctttcctaagtaccttcgaccaacatcaacacgtccaactggcctcagaacccaagttcatgttgggcctcgatattttcctagccggtttaaaacaacaattaccacatcacaactaaaaataggggtaaatccagttttggattcacccctatttttacgctttattttgacgaacaccgccgtaatacgcgattaacataatgatcattaagctgaccatatagattggcagaactaaaattgaacccgtgtgcagtcgactaatcccataagttaacaaactaattaaccaataatacgcgaagctaaacaggccgcttgccgtcccaatcacggtctcatacccaactagtgctaagttcaatgcaattggtaacgtcgtattcagaccccagaaagttccaaaaatagtaatgattattaaaatcaactgatcattacgactagcaaagactaaaccaacaccactaaataatgccaaccacagcccactgcgagccactctgacagcatcaaaatgcgccaagccgtaattagtcgtcactgcgcctaagatactcgccgctgctagtactaaccctaagaggccatattgaatggccgttaacttaaaatgactcataaaaataaaaggtgcttcagcataatagctgaacaaaataccattaaccccactgattaaaataccgtaggcccaaactttccgatcactcagtaatcgtttcatcaaagcccccacagctacttttccaggcgtcttttgaacacgcgtttctggcaatgctgcgaacgtatataatccagcactaatcgccagcaccactagaactgaaaaaacactgcggtaaccaaagtaggtctggactaatccgccaattagtggtcccaatgctggcgctaacgccatagccgcgccaatttttgcgaataccttagcacccgtaataccgctgaaagcctcacgcataatcgtctgcgtgactacggaaccgacactcgcaccaaacgcttgtaccattcgcgccattaataactcgggaaattgtggtgcgcttaacaagccgagattcccgattagatagatgccaatcccccacaacatactgggacgtcgaccgattcggtcggataaccagccccaaaataaaacaccgaatgcaaaagcaccaaagtaggtactcatcgttaactgcgttatttgtggactgacctgcatcacacgactaatctccggcaatgcaggcgtaaaaattgattcgctgatttgtggaaaaccaaccaacacaatcattaaaagaattgatggtacttttttctggacgtttttcataatgcactcctaattatttaatctgctgaaaaacgtccttaatcatctacggcaacacacacaatgaattgcgggtaactcatccgaataacctccaatataatcaatttttttattcatgatttgaatcgtacattgactatatcaaaaaacaattgcgagttcaaactaaggtgatattcaaagcctgaccaacaactcgaaccagcgctcgttttctttaacgcgctaacccaagcagacctttccgcctaactacagaattgcccatatgattaaagctcaaatcatatgggcaattcttaggttatgctcaaggtcaaaccgcttgtgtgagcacttattttttaacgtgctcgtcctcacagtttcctgtgcttagctacgtttcgcaaacaaagcccacaacggaaccaggctaatgctcagaaactaccgtgagaactcacacttatattttaacgcgcttctcgagcaatcttctccgcctaactacaaaataccaatcatggttaaggtcaaccataattggtatttttaggttatgctcgaagattaaccgctcgaatcagcgctcaagcttttaccagcttgcttttttgatgcctggaatttggcctttgtgtgctagttgtctgaagtttaagcgactcatcccaaatttacgcatatacccgtgtggtcggccgtctagttgatcgcggttgtgtaagcgaactgggcttgaatcctttggtaattcagataacgcgacataatcaccttttgcttttaattcagcccgtaagtcagcatatcgtgcgaccatcgcctgttgttttgctaattttgcaatctttgatttttttgccatgtttaacaaacctctttttcaattttatattcggtttgaccgttcaaaccgttctgattagatacccaaggctatcctacatggcattcgattaaatcacaagtaaaagcacttattaaaagtaattgtttttgcaaactagattaagtttagaatctgattggattaatcacactcttttctgaaatgtgcttctactcaaaatatcccgtgaatatcagcacgctgattttaaacgcacttttggttgcaacaacttccgcttaatctaacttgaccaataatcttaaaccctagattactgatcaagttttattaatgctcaattgttaccgcaaccaacgcgctcttttctgaaacgcgcctcccaagccaacctcttccgtctagctacgagtatcaaatcatgaccataacccggtcataacctgctactctaggctatactcagaagttaatcaggcttgtcagcgctcttttatttgaaacgcgcttctcgagtagccttttccggttaacgacaggattcaaattacggttaaacccaaccataatctgcatccttaggttaatcctcaaagcctgaccaattcggatcagcgctctttttctgaaaaccccttaacaaatatcagataagtgttatgcttaggtaagaaattaaattaagttaggctgttttttcatttgtatacgttataataacgcgcttgtacaggtggtcagttgaccaatcgtacaggtgtgtttttttgtggttaaacagcccatctttaacaaactcaggaggattactattttaaagcgcaagaatgttgataaagtcgtcttcatccccacgatgttgctattcgggattgtctccatcattttattggtaggaggtgactcgctgcaacaaacggtttctcagattttggacgcactaacgacacattctcgatggctttatattggtatctatatcattaattttatttttcttatctggctcggattcagtcgttacggtaaaattcgttttggacaacccaacgagaagcccgaatataatgacttccaatggggtagcatggtttttgccaccgcaattgatgccagcattttgatgctcagcacaactgatccgttgcaatatttacaaaacccaccgtttggcgctaagcccttttcagcagcggcttaccgttacgccaacgtctgcggtcaattcaactggggtccgatggcctggatgatttttgccaccgccacggtcgcgattggttatgcgatatatgtaaaaaacttacgcgttcaacgcttgagcgctgcaattgatttattagaaggtccccaaatgtacaagaaaattggccgtaaactcattgatttcatagtcgttttcgggattatgggcgggattggttcttcaatcgggatggaaatccccgtcatttctaaagttttaagtgccatgactggggtttccgatacactttggttaaaattaggcctcttcggcgttttattagtgctctttaccctaacggtttacgccggtttggataaaggcattaaaaagttaagtgcttggcacatttacaccgccatcggtttcttattattagtcttattaatcggcccaaccgtcaaattgattggtgcagaaggcttggatcttttccatctagtcggtaaatttggtcgactcagtttaaacgccacgggtaaaaatagtcaattcgcccaacatgaaatgctcttctattggggttggtggttatcttacatgcctgttatgggcttattcatcgcccggatttcacgaggtcggaccattcgccaagtcttacttgggatggcgacttatggtgccttaagttgtatgagtttctacgcgattttaggcggttacgctttatacctacaacgcaccggtgcagttgatttggtccacattctcaacacacaaggccaagccagcgtgattgctgcgttgattggtaccttaccttggaagattgtcatgctcacgattttctgtttgtcatgttttatctttttggcaacgacgatttcatcgtccgcatttatcgtttcgtcatttaccagtctcgaattaaaaattggccaacaacccgatcgttggaatcggatggcttgggtcgtcatcttcatcctcttttctctcggaattgtggtcgtcggtggtttcgaaacagtccaagcgatctgtgtcatagcgggcttcccactgattttcgtctgtgcactactcttgatttcgattttccatgccgtcaagactaacgagaccccgctcaaataattttcaataacctttaaaaaaataaatccgcttttctgaaaaaaataacttatgccacaaatttttttatggtacggttataactgttaacttttcagaaaagaggattttttaatgccccaaaataagaaacaaggtattttcttcacggccatgatgtgtgtctgcatggtgattggtatgagttcttacaatatgattattcgtgatagtttcacgattaaggcattcgcaacgatctttttaccatgctttatcatcgcttttatcctggaagcattcatcgttggtaatctggttcaatttgttttggctaaattaccattgaatcatgagagccgttttcaaatgattctaggcacttcatgtttaacacttttatgcatggtgacttgcatgtccgttttcggcatgttggtcgaaggtggcattcccactgacatcatgcacacctactttgccacttggcggacgaacgtcgtcttcgctttcccttggcaactaatcatcgtcggacctttctgtcgcatgattcttggtcgcgttcaaaatcgccaagtcgccgcacaagtcgactaattttattagaaaaacctcatcttctaaaaaaatcacttacgagcgctattcgtttatgctacggtggtaattggttacttttagaaagaaggttttgtcgatgccccaaaataaaaaagaaggtattatttttacaaccctaatgtgtttctgtatggtattagggatgagcatctataacctattgctccatggtgcactcacttggattgcactggtgactggtctaattcctggcttcatcgtggcatttatattagattcatttgtaatcggcgtactcgctaaaaagattgcgttcaaattgccgttaaatcaggacagcaaattgcagatgattctaaccatttcatgtctcatgattcttgggatggtgacttgcatgtcactattcggcgttttaattgaaggcgggattcctaacgatttatccggggcctacttacacgcttggcgcatgaacatcatcgtcgcgctaccacttcaattgataattgttggtcctttttctcgattgattcttggtcgaattcaagccaacgcctaaccaaagaaagaagcaactcacccgttccaatagggagttgcttcttttttagaatcatttttattttgtcgttagtatctgattaatcgttgctaattctgctggttcaaacgtcagattattcaacgcacgaacgctgtcttgtaactgactaatccgagaggcgccgactaagacgctggcaacagttggttgttgtaaattccaagctactgccatttcggctaggctttgtcctcgttgttgcgcgacttgatctaacttttgaaccgttgcaatcgtttgatccacccgttcttcagacaagaatggactgtccggacgcgctgctctggaatcagctggaatcccgttgaggtaccggttggtcaacaagccttgcgctaatggactaaaggtaatcgcgcctaattgttcttccgctaaaacatcggttaaaccatcttcaatccaccgatccaacatattataacgcggttggtgaatgataaacggggtccctaactggcggaaaaccttagtaatcgcttgggtttgcgccgccgaataattcgaaatcccgatgtacagcgccttgccttgttgcaccaataaatctaaagcacgcgccgtttcttcgattggcgtatcaggatctggccgatggtggtaaaaaatatcgacataatccaactgcaaccgttgtaacgattgatcacagctagcgatgatgttcttcttagaaccccattcaccataaggacctggccacatataataaccggcctttgacgaaataatcatctcgtctcgataactttttaaatcatcgtgtaatatccggccaaaattggtctcggcactaccagctggtggcccataattattcgctaaatcaaaatgcgtaatgcccatatcaaacgcaccaaaaatgatttctttttggttggcgactttatccgtttccccaaagttatgccataagcctaatgaaagtgcgggtagctttaacccggaattgccgactcggcgatagatcatgtcttggtaacgattttcgtttgctgtgtaggtcatcatagaaccttctttctagattgaaatcgattacatttatatagtataccactaaaaaagccttctcttaaatgaaggctttttgatattaaccaatcttacgaatggcgtcttcgaccatctgccaaaatttagcgtggtctaatttaacggcaacacttgtttgacaatcttcaggaattggatatctgaaatcagcaacggtcatgccacgggtgagcgtgccattcaattcaatatcaacgggcacttttttggtgaccatcaccgtcggatcgatgacgtaagcgacggcacacggatcatgaacgggcggcgcatcgaaattttgccccttcttatacatatcgcggaagaaggccaataaatcgaccacaaaatccgctgtttccgttttaatcgctttaatttggttgacaatctcaggcgttgctaaagcggtatgcgtgacgtccaaaccgaccatcgtcacttgccaaccggcgttgaagacaatcttggccgcttctggatcaaacttaatgttgaattccgcgacagcgctcgcattggcatcgtgataagcgccgcccattaaaacgacctctttaacgcggtcaataatttggggttccttacggacagccatggcgatattcgtcagggcacccgttggtactaaggtaatcgtcttggcgggattttgcataatcaaatcaatgattaaatcaaccgcgttaatttcttcaagcggcacggtcggttctggcaaaacaacaccatccaaaccagattcaccgtgaatatctgctgccactttaatttcttcaattagtggtcgtgaacaacccgccgcgattgggacatcgtgcattccgattaaagttgcgaccgagcgcgcattccgcgtcactttgttcagcgtttgattagcagcaacggtggtcaccgctaataaatcaatctccggattaccatatgccaacatcattgcgacggcatcatcatggcctggatcacaatctaaaattatttttttacccattatctaaaacctccattttggtgctaattcacttcttatgataacatattcatgaagcggtttcattagaggcgcggtactaatctttaaagacactagcaactaacttagagaggatgatcggcatggcgtataccccattcttttttctaatagcggtcttattggtactagaagcttggctcatttacaattacctgcgtcatcgctcaaagggactattaatattgagcatctttttagcagtcatcatcttactcatgttgctgccgattattatgtttttgattcaatgaaaagtatgcttttctaaacgtgctttttgttgcaacaacttccgcctaatctaaaatatccaataatcttaaaaccaagattattggatatttataattagtgctcagttgctacccgcaacgaaaaacactcttttattaaacgtgctgcttctcacagtttcttccgtctagctacaaataaagcgcgtacgaccaaataccaggtcgtacacgctttattttaggctatactcagaaactacccgtgaaaattagcactctgtttgaaacgtgccaacccaagcaaacctttccgcctaactacaaaatcgtccaaatgattgaaattcaaatcatctggacgatttttaggttatgcttagaagctctcaggattacccatgctagctatttaggtaacatttctaattcataaatattctgctctatcttatttttaagctgtttaaatgcttttgaaaactctgaataatttatgtccgggtatttatcattgattttttttacctgataccacccagcgtcccatgcctgaagatgatattctggatagtcttcaaataataacggccgattaaacaaagtagctttccaaacttcagtagcactatttaatacactctctgcctctaaagacagattattattattccttatcatattgatctgttgaaaaacaaacctgtcctcatcacctctcagatcatcatatattggagaaagtttaggatgattctcaaccacctctctaacaaaatctttagataaccaaaaccattcatttatccacctaccgctcacccctgaattcgaccatccggtatcacgatatgatgcttgataactagcattttcaaataatgaaaatacaatagaatcaccgacaaattctttatacctaggatctttcatatttggataatgaaaattatcttgttcgttataccatgttggagtaatagcgcgtctagctgcaaagtttacaactgcatgttcaaagttttcagataatacattaaaaccgtttgctttatatgcagatcctgtcacaatccaaacaccactattaagagtcccctctccaatattattagaatttgacaccatataacctaacgaattttttaatagtctacctctcggcgaatttcctttgctttcatttaaagcagaggacaattgaggatatgagcccagtggtaaacttgcgtttgaaattgattgtaacggctctcgcacccaagaacttaagctttcactatcatatacttttgtcattgaatgacttatttgttgaataacattcattttcccatcagccaataaatttgatttttctacattaaattcaactgtttgagggattacatcatcataactttttaacttatagactgaaaaagttatcggccacgtactagccgtatcactaaattctccagaatttaataaatttcccttcacaaattcaaacctatcgaaaaatctatcgttaaaattattaaagtatttccctcctgcaaaaaaacgaggtttagtaaaaaaggcaatatatacattacttagcttaaagtcatctatcatcttcataattctaataaagaattgacagtataattgttgggacgcgtcaccataaccatcattaatcataatcgtattcattttatttttggagattccttttttactagttccatcagcattaacgttatttgcagttccataaggtggattagtataaaatataacacgtttattcgtttttccggcttttaataaggcattatatagtttctcgggcattttccaatcactgatatcaggattatcaattgtatttaaattcacatcatcattcaaaaaatcatattgaaatgtggcttttgcttcacgattatacccatccccgagtaatatttcagaatcatgatatgtggaaatatataaatcatcgtatctccattgccgcgtcagatttctaacccctgctgccggatcccatactaatgaattttctttataatcattaccaatcgattccttcattatttcatccgcacgtttagcccatacatcaggtgtccaaaaatcacctttaaatcttcgagtatcagcttcaattaatctatcagcaattcctgtaagtttatcgatttctttactagtaaaattacgatcataatgattcaagtatgcctctaacttgaccccaaacactttaactttttgatcatttggtaaatgatatagatttcggttacgcggtataaaataatattcatcatcatttttactcgtcaacatatgcatgaacatgttaaccgcttgtacgggctctattttgtttggctctttaaatgcaatattgttaaattcatcaaacatacctacaattgtgctgtcagacactttaaccttaaaagtcttttctccatcctcttgagtaatagaatctatcgtatcaaaaagatctagtaatgaattatagcgttcatccaagttaccacctacaaattgaaatggatatacactaagattcgcgtcatcctgaagatccttcatcaattcaagatcttctttataggcagagctaggagctacattccagttgtaatcaccatcaaggtatttgtaaaaattacttgctaacaaaataaatgactgatcctcatcagcgcctacaattactgtcggcatttgtgcagtactactgtctttaaactttttcatataatgaacaacttgacaagttattctcgcacgatcatacgttttagttaaatctgtatcgtacttaaattcaagcaatatctttaaagcaaataaaatcgaaccagaattagtataaataaaaccatcaacattattttcagaagaaatttgataatcttcttttccgttatcaatataatactgtacaaaaatctttctccatgcattttcaacatctttttcactagccgaaacttttaacgaatcaaatagaaccttagctgctttcttcgtaagtctagatttaagttctttacgacgacgcttatcttgttcctctctttgctttgcaccacaccaagacaattacgccaccatcccttcaataataagaataattactaaatttttattcttatactcatctttaaccatattaatgtatttcatttattattcctcttttcaattgaaattaagttcaaataactcttcatatctatcctactcaatatatccctatcactaacttttcaatcttttcttaatgtattatactgcttacagaacttcaatttccattaaggtatctgcctaccgtctaaattcaacaaataaaagattgatcacttaccgcagccaaaagcggcctttattcgccagactaggctaatgctcagaacctatcgtgcggcttcgcactcttttattttgaaatgtgcttttcgttgcaacaacttccgcctaatctaaaatatccaataatcttaaaaccaagattattggatatttataattagtgctcagttgctacccgcaacgaaaagcactcttttattttgctgctcttttgacgtatgtgccttcttgggtgttgatttctaggacttcgtcagcactgatgaaatctgggacgctgacgactaggccggtttccattgtcgctggtttgcctgaaccggtcactgttgcgcctttaattgaaggttgtgtttcaacaacgcgtaagttaaccgttgatggtaatgtcacaccgatgacttctgaaccgaagaattgaattttgcagttcatattttctagcaagaatttagtggcttcttcgatgacatcggtttggatttcatattgttcatatgtttccatatccatgaagaatgcgacatcgtcttgtgtgtataaatattgaacatcttttgtatcgatcatggcttgttcaactttaacttcaggacgcatcgttgtttcgacgattgaacctgtccgtaaatcacgtaacttaacgcgcataacagtattgcccttacctggtttatggtgattagcttctagaactttaattaatttgccgtcttgttcaaaagtcatgccggctctcagattaactgcttcaatcatgattaaatatcccctttaatttcagaaatggttactctctaactttaacaaatgtaagccgtttacgctactctatatctaacttcggcacacttgtgcttgactgtggcgtgtagtgttgatacatcttcgtaattgggacggttggtaacccggttttaatcaaataaacgtgttgtttcaaataacgtttgtccgccgagtttttaagtttgtaacattgaatcgccatcttaccagtactattggcgttatcttgcccttcgaattggactttggccagcggtaaactaatcacgtcttgattcactttaaaatacgcctgatcttgattactaccgagataactggttttggatgtgcctgctggttgatagaattgtttaatctgtttcaaactgtgatcatcgaccattttaacgacctgcgcatcacccttgaaaagttgcaagccggttaaatcgttgcgcacattttgtgaactcatcatcaaccaaacaatcaccaaaatactgatgaaatatacgatatgcaagcttaaactactagccgcatgggataatttaaagatataactttcttctaaatctttatccatcacttggcgcatgatgcggtgtgcaattaacttatacgataaataccaaatcgctaagaccactaccgttgaagccagtgccgttaaaatggtattatttaaaatttctgaatcggtcatcaacggactaaatccgctcacgattttgaccgttaagccccctaagactacgataacaatcatctgtaaggcaaaaaagcgtgttcgaatactactactaatggccgttggtgtgaccgttttatctgatttatgcatgccaacaaatcctccctcattaacctacccatattttagcataaccgacgctcactagcttgtttaaaccgactgaatccccttattttcgccaagacaataacgtataagtcatcgtcgttcggctcattaaagtcgcttgattttggaataatcggtctaactcgcgctttaaacggccttgatctgaataatccgcataatattcagcaactaattggcgttcaatcaattccgaatactgatattgaaacggctgttcaacaactgattctggtaattgctgtttaaaagccgcaatgatttgtgcatctacatttggatcgaactcgtcaatccctaggcgtcgggcgagcggactaaataaatcatcttcatttaacgttaatcgaagcaataccgtccacttttgactcttttgactaatcgcttgaagcttatcaggtgatacacttgggtttaaagcgctaaaaacaacctgataggtgtcattgggcgtcgtcgtcaaccattggtctagcgattcttgacggtaatcaacattagtcatctgatttttctgggcttcttgttgcgcgtaatttaacatcccacctgaaatatcagagatcgtatactgttggctgttgcttgctaaggccggcaagtaacgcccactgcctccgcctaaatccaaaagtgattcggttggtaaaatccgctgtacttttaaaaacgccagaacatcctggacaatcggcacttgcgactcctgttgaatctgataataatgggccgcaaaatcatcccagaatgtttgaacatcatcgtccatcttcactacctcgtctttttccgctaactgtccccctagcttaccaaataattcgtcaaacgccaaaaagcagccttctggtttggaaatcaaccaaaagactgcttttttataggcttgtctgaaacgcgcttttggttgcaatagcttccgcttaatctaacctaaccaataatcttaaaatctagattaccggttaggttttattaatgctcaactatgcccgcaactaacgcgctcttacttgaaacgcgcttctcaagtagccttttccggttaactacagaacccccatcatggttatagatcgaaccataattgagtttcttaggttaatcctcaaagcctgaccaacttgagtcagcgctctatctgaaacacgttcccgaactagcttcttgagcaatcctctccgcctaactacataatgacaattatggttaagttcaaccacaattgtcattattaggttatgctcgaagattaaccgctcaatcagcgctctgttctaatcttcaaacccatctttatccgctacttgtttgaaccagtggcccgactttttgattgttctttgacagtcgttgtctaaatcgactgagatgaaaccgtaacggttcttgtaggcgttggtccatgaccagttatccatgcaggtccacatatgataacccagacagtggctgccttcttgaatggcttggtggacgtatttcaaatgatctttgacgaaatcaattcgataatcgtcgtcaatctgaccatctgcattacggtaccgttcttcaccttcgacacccatcccattttctgagatgaaacaatcgatgttgccgtaattttcgcgaacattggtcaaaatatcgtaaatccctttttcgtagatttcccaaccacgatacggattaatctttttacccggcatctcgtaattatcgaagaaatcatctggcataatcccgtgcgtatgatcaattggcgtttctttggctttcacccggcgtggttggtaataattaatccccaacaaatcaaccgtattggccttaactgtcgctaaatcaccgtcttgataatcagggagtaattgattctcttttaataatgcgactaaatcacttggaaattcacctttaaccgcgggatctaagaatgatcggttgaaaaaggcatctgcaatcttggccgccttaacatcagctggattcttggcatcgcgtggataactgggcgttaaattcaaaacaatcccaatttgaccaccttgattgagcgcatgataggcttcaatcgctttggcactcgccaacgtttcgtgataaccgacttgaacggcgtgttgtaaattaatctcattaggataatggaattggtacaaataacccccttcaacgggcacgattggttcattatgggtaaaccatttcttgacgcggtccccaaataattcaaaacaggtttgcgcgtaattcacgtaagcatcgactgttttacgattcaaccaaccgccttgttcttggagcgccattggcatatcaaaatggtacaaattcataaacggttcgatgtcgttggcaatgagttcatcaatgtacgcgttgtagaaatcaaccgcagtttgattgaccgcacccgtaccttctggaaataaacgactccattgaattgaggttctaaaagagttatgccccgtttgtttcattaattgaatatcagttttaaattgttgatacacatctgacgttttggctggtccgacttggttaaagaatttttctggcgcttgttgataccaatagtcccagatattatcccctttaccatcgccgtcaatccggccttctgtttgcggaccgctcgcagctgatccccaccagaaattttctggaaatttataaaatgtcatcgtcaatccagctccttcttatttgaataaatttagtataacaacgttttcatcaaaaagccattcaaatatttataatgtctagacttttattattgtgcgtggtatattaagttttgtaatcgattacaaatttatttaaggacggtgcttgccgtgaatcattttatggacatgcttaacaaacatatcatgccacttgccactaagcttggtcaaaatcgttatttaactgttttgcgtgatgcttttatgctctcattccctcttacaatgtttggttcaattgttgttgttattactaatttacctttctttaatgatgcgactaaagcgactttaacgtcactactaggcaatggtcaaaatgcgacgatgtcgattatgactgttttcgtcaccttcgggattggttattacctatcggattcctacgatgttgatggcatattcgggggcgcagttgcctttgccagcttcctgattctaacgccatttatgatgacgactgataaaggcgtcgacgtttccggcgttttaagtctcgatcgactgggtgctaaagggatgttccttggcatgattgccgcgtttatcgctgctgaactttattgtcgcttcactaaaaaagggtggcaaattaaaatgcctgacggtgttccgccagcagtttccaaatcttttgccgctttgattccagccgttttaacattaacgattttcttagccgtacaagctgccgttactggcttattcaatgtcaacttacacgatgtgatttatgaagtcatccaaaaaccattagtcggtttgggtagtagcttacccgcaaccttagtggccctcttctttgtccaactactctggttcttcggacttcacggtcaaattatcgtcaattcagtgatggatcccatctggaacacactgatgctcgaaaacttagatgcttataaagccggccgtgcactcccacatatcatcactaaaccattcatggaaaccttcaccgtcggattaggcggctctgggatgactttagcagtcgttatcttgatggccttcgtgatgaagaagaaacaatatcgtgatgtcggtcgactcgcattagcgcctggacttttcaacgttaatgaacccgttattttcgggatgccaatcgtgttgaacgcttcaatcttcatcccttggttaatcgcacccctcatcgtaaccgttcttaattacgctgttatggcgattggtttggtgccagcgccaactggggtttccgttccttggacggtcccaatcttcttcagtgggatgttagccactaactcagtgctcggtgggattctccaattaatcgacgtggtgattgtcggattaatctggttcccattccttaagatgttagatcgtcaaaaagatcccttaacgaactaaaaagattgtcttaccccgcactttctactacactagagaaagaaagcggggtatttttttgccaaaatacgaagaaattgcgaatacattacgccaacggattaaaaaaggcgtttatccggccaatacacttttacctaatcaaatcgacctcgttcaagaattcggcgctagtcggatgactgttaaaaaagccattacgattttaaccatggagggtctcgttttagcacgtcggggtgccggcacaaagattctggaccattctttttggaataaggccgcgatgccggcaaatcaatacgacggtatggccgcggacattgcccgtttaggtaagaccttaaccagcgaaatcattcaatttgaagtcgtctttcccacacctgaaattcaagaatatctgatgcttgccgatcaagaaccggtttatgaaattattcggttgcggatcattgatggtgttaatacgacgcttgaacacacctacatgcccgtcactcgggcccccggtctaaccgatgacgttctaaagcattcggtgtataactacttgaaagagaccttacacctaacatttgcgggcgcttttcggaatattcaagctgataagtctgatgaatacgatcaaaaatatctcgattgcgcaccgaccgatcccgtcctagaggtcgaacaagtgatttatttggataacggtgaaccgattgaatattcacgtagtcgcaaccgttatgaccgccggagttatacgtatctcgatgttaaaagttaaagacacaaaaaaagctaaccacctggttagcttttttatttagtcctatttttcaacatcttgtaatttttgattatcatctaattgcgaaataccggcttggccgattttttgcaaatgagtcatgctaatccataatagcacgagcgcaatcgcgatgaataataagagtacaaagaatgtttgtacaatttgaccgttacctaagccagacgtaatcgcttgtctgaagcctaagattgaatagctcattggtaagaatggatggatcacattgtagaaatggttcgtgatttccattgggaacgtcccaccagaaccacctaattgtaacatcaggagtaccatggctaagaaacgacctggattatcgaaggccattgataggaacatgataatcgccatcgaggttaacgcgaaggtgactgaaactaggaagaattgtgctggatgatcgacatttaagcctgcgaccatcatcaaggctggttcaattaagcccataccgattgcgacaattgcgccaaccgcaattttgctcaagaaccaagcagttgctgattgaccttccattgaaatcttacgaattggataagcaaagttaaagacgattgccccaacgaataacgctaatgataaaacatatggtgctaaagcatgaccataatttggcacatagctatagttagaatgtttcaaatcacttggtgccgcaaacatatcggcggtactattcgttaatttaattgagttgactttattcgcaccagaattcaagccagtggttaaagtcttgttaccattcttcaattgagtggccccagagtttaacttagttgagttggccgctaattgacttgtgccatcagctaattgatcaacaccactcgttaaagctggaatcttgccattcaattggactaaaccaccatttaaggttgttgaaccagtcgctaattgactaacaccactcgttaattgtgggacttggctattcaattgagcagtaccggcagctaattgacttgaaccactagctaattgaccaatgccaccggttaaagcaggcacttgaccgtttagttgagtcgtaccggcagcgagttgagtactaccggctactaattgtgtatttttacttactaatgttgaagagccagttgtagcactacctacacctgcagtataagcatttacgcctgctactaattgaccaatttgaggtgtcatcgttgactgactagcaattgaagcaacttgtttagtaacggcatcttcactcgtcaacttactagcatcaatcactggattattaccattaacgccactattcaattgtgttgcaatcccagtcgctttagtagagagtacatttaactgattaacaccattggtcaatgtcgtcattttacccattaaagtcgttatcttagtttgcatttctgcgttagttaattgatcactaacttttaataattgttcagattcagtacttaattcggtcaattgcgataccgcagtgtctaactgtttcatttgaccaagtactggcgttaattgattaatcatccctgatatcttgtcaacatctaattgacttgttgcatcattaattgctttaagtgcagttaaatttgatgttgttttaccttgaatatcttgtaatgctttttgtccagccggacttaattttgaagattctgcactaattgttgcgacatctgtcaacgttgctttcgaatttccagcaattgttgttccagaagtcgttaagagtgttttgaatccgcttaattgcgttcctaatgctggtaattgtgcgattgtctgctcatttgctttatacgtattattaagttgaactaacaacgccatgcttggtttcaagttttctaacatagtagaaaggtctttagattgttggttaacagatttcatcgtagctggcatagcagctaagtctttcatctgatctgcttgtccattcaattcattgctaattgtaccaataccttgattcattactgaattcagtacatataatccggcaacccctgttggtaattggctggttgatgccgctagtttagtagcacctgaagctaatttacctgattgaccatttaacttagttaatccagtatttaattgatcagtgccgtctgtataggctgaaacgccactattcaattgacttgcgccactgttcaactgagtaacaccagttgagagtgcaccggtcttgctatttaacgtttgtaaaccagtatttaattggctagccccactatttaattgactggcacctgatgctaatgtgccggtcttgctgtttaacgtttggagacctgtatccaatgcttttgaacccgcggctaacttctgaatgccatctgataatggcacaacgcttgttttcatcgtcatgacaccatcgttgactttgtcgacacccgccgtataagtgtttaaaccgtccgctaacgtaattgaaccatccgttaacttcttagcgcccttagcagcggttgtgaaacctttgccggccgtcttaacttgtttaaacatgactttagcatatgacttcgtaacggtttcccgtaattcagcattgacttgtttagcgcccgcttcactaatgacttcagcgatgaagtttaatgagtcgttcgttttatagttgatttgcattttcttaggatgcttatctaaaacggtggccgcattggctgagaagtttttaggtaaggtaattacggtgtaatattccttatcctttaacccttgtttggcctttttagctgacacaaaacgccaaccgatttggtcgtttttctttaattctttgaccaaatctttccctgcgtttaatttttgaccttcataagtggttgggacgtcattattgacgacggccactggtagatttccggtactaccgtaaggatcccaaactgatttcaggaagaagatactatacaagaacggaataatcatgatcgcgattaacgaaatcaagataattttgttcttagcaatgaacttaaattcattttgaaccattttcatttctgccaaactccttatatacttttgttttacaatcaattacatttaatatccataataacttgactatcttaccgctttttttgaaaactttcaagtcctaaatacctattgtctgaaaatagccaaaaaaacacgactaattaagtatattagtcgtgtttcttctataaataggttatttattgtgtgatgacggttccgaccgtttcagccgcactgacggttacgtctgctgctttttcaaaggtcaacgtcttgacgcgatccatattcgtgaccaagactaacaccgtttcggctttttgactttcacgaatcatttcgaaatcaaccttcgctagttgcgtagtcgttgaaacactctgaccttcttcaactaaaatctcgaagggcttgcctgctaattcgaccgtatctaaaccgatatgcacgaggatttctaacccggagtccgttttaatacctaacgcgtgtttggttttaaagatattcgtaattgtcccactaacgggtgaataaaccgtatcactagtcggttgcacaccaaagccgtcaccggccatcttttgtgcgaaaacaggatcagcaacttggtctaacggtacaaactggcccgtaattggtgctgctaattcagtactgacttctttggctttaaatagtttaaacatctggtttcctcctaatcgtcgcgtcctaatatttgattgatttcttgacttaataaatcagctttcccgccaaagacggcttgaatcccaccgttgacttcgaaaacagctgtggcgcccaattgtttaattggtgcctgatcaacaagcttgccatcagtgacggcaacccgtaaacgcgtggcacaagctgcaacggtttcgatattcgcatccccgccgagcgcttcaataatgatttgagcttcatcgtttaacgttgattttttgccagttgtttttggcatcgccgcggcatcagccacaatatcatcttccatcccaggaatcgccactttgaacttgcgaattgcaaaactgaagacgaaataataaacaagtgcccagacaatcccgactggaatcactttcaaccagttggtcttggcttcgccttgtaagaccccgaataataggaagtcaattaaaccgccggaaaaagaattcccaatccgaatgtttaaaatatcggcaacgaagaatgaacaaccatctaagaaagcgtggattacgtataaccatggtgcaacgaataagaacgtgtattcaacgggttcagtaatccccgtcaagaatgacgtgagtgcgccactaaagtagagaccaccattctttttccgattagctttaggaatagcgcggtacatcgccaaacaagcggctggaatcccaaacatcatggttgcaaaccgaccggcgaagaaccgcgtgccataagtgaatagacccgtatggtttggatcagctaattgcgcaaagaagatattttgggcacccgagatggtatgacccgcaacgacttcggtgccacctaatgaggtgtaccagaacattggataaatcgtatggtgcaagccaaccgcaccggttaaccgtaataggaaaccgtataggaatgaaccaaaactccccatttgggcaatttctttaccggcgacgactaaaacgccttgaattggtggccagatcatatagaagaaggcccccaagataattgcagcaaacgatgaaacaatcgggataaaacgcgaaccaccgaagaatcccaagaattgtggcaattcaattttacgataacgattatgcaagaacgccaccgtaccaccaatcacgattgagccgacaacaccggtatcaatcgttgcgcctttagcggcaaacatctgcaacaaaccactaatcgttgcggtgtagactagaaaggctaccccaccggctaatccggcagtccctttatcaccctcggctaacccgacggcgatcccaatcgcaaagattaaagcaatgttggtgaaaacggcgttcccggcaaaactcatcaccgatagaatcgtctgtaaccacgtttgatctaagaatgggtaagccagtagggcacttttattagttaacgccccacccaaacccaataatagaccggctgctggtaaaatagcgatcggcaacatgaaggcacgacccaattgcgaaaatttcttaaacatattaattcctcccagaattcaagctatctttgagcatgactgactatgattgaagtgctgcgataaaccgttgggcaatttccttaggccgcgtaatcgcgccaccaacgacaatcccagtggttccgattgctttaaccgccttgacctgttcaggtgaatgaatccgaccttcagcaaccacggttaaatgattggcgactaattgttctagtaacgccatatcggggccctctagtttgggactttcttccgtgtaaccgcttaaagttgtgcccacaaaatcaacaccggctttggctgcgttcaaaccttcttctagatttgaaatatcagccatcaataattgatcgggatatttcgctttaacgtcgcgaatgaattcgttgatcgttaacccgtcatgacgcttgcgcaatgtacaatccaacgcaatgacttcaacaccggttgcgactaattcatcgatttcacgcatcgtggctgtgataaagggtttttcaggtaaataatcgcgtttgataatcccaatcatgggtaattggcaaaccgctttgatttcaaggatgtcgcgaaccgaattggcgcgaatcccaactgcaccggcctcttcagcggctttggctaatagtggcatgacaccaccttgttcagtatataaaggttcaccaggtaacgcttggcaagagacgattagaccgtcgtgaatttgattgataaaagtttgtttgtccatttcattttctctccaatttgtaattatttcggaacttctctccgaaataactataacatactccaaacgaaatgcaaacgctttattttaattgactttgttggtcattaattgcaaacttaggttactagtatcctgaaaggacaactcatgagctatacacatttaatccgtgaacattatccaaaactcactaaatctgaaaaaaaagtcgctgatttcatcctttccgcccaagataaagtcatctatagcactattagcgacgtcaaaaagaataccggcgtcggtgatgcaaccatcattcggttctgtcaaaaactcggcttctccggcttctccgatttgaaaatcgaaatcgctaaagagaattttaaccatcacgaagcgactgatcaaaccgtcaattttgccgatgtcgtttcaaaacgactcgtcgatgccgtcttggcgacccaacaactgattaacattgagcatgttgaagcagccgttaaattggtgactgaagcgcaacatatctatattttcggggtcggtagcagtggcaacacgagtactgatttggaagggatgttcttgcgcgctggcgttcaagccaaagccgtcatcgatccccatttccaagcccaagtcgcttcccttttgaccaaggacgatctcgtgattgctttctcactatcaggtaaaaccaaagatacacacgattccgtgacgattgctaaacagaatcacgccaaaatcatcagcatcaccaattatttattatcgccaattgcccaacaaggcgacgtcgtcttgcaaaccgcgattgaagaattcttaaatggtggctcactagccggtaaagtttcccagttatacctttgcgacgtcttggtcaacggttacgaacgcgccaaccaaattgataccctcgcactcaaagaaaccgtcttacggtcaattttggataagagtttggattaatcaatcaagttttcaacgtaacttctaacggggttacgtttttttgatgttcaaaacgaccaaaaaagagccggcagctggtagactgtcgactctcatactgattatttatagttgttccccattacttttaattaccgtttgataccagccaaacgatttcttgcggtaccgatcgagcgtgccttggcccgcgtcgtctaagtcgacgtagataaaaccgtaacgtttcgacatttgaccggtcgaagcactgactaaatcgatacaaccccaaggtgtgtagccgattaaatcgacgccatcgccgattgcgccggccatcgcttcgatgtgttcgcgcaaataatcaatccgataatcatcgtccacttggtgttgggcgtcgatttgatcgacggcccctaagccgttttcaacgatgaataacggtttttggtaacgatcatagagttcgttcaaggcgattcggaggccaacaggatcaatttgccaaccccagtcgctcgctttgaggaatggatttttgacgccacccaataaattaccggccaccgtttcttgttccgccgtcacttcaacagccgccgacatgtaataactaaagccgatataatcaaccggattggcctttaagagtgctaattcttcatcgttccaattcaaatcgttaaaagtgaacccatattggcgcattaaccggttcgtatacgctggatattcgccgcgaatttggacatccccacagaaataattgaaatcctgattctgctggattgtcgccaactggttcaccggattggcattgtagctgtaagtcgttgcgaacaataacatgcacccgacttgtaaatgcggatcaagttcatggccgattttaaccgccatggcgccagccacaaattgattgtgccacgcttggaaaatattttgcttctgattggcgccattggctgggactaagccttggctcatcactggaaaatgcgcagcactattgatttcattaaacgtcatccaatagctgacttggtcgtgatatcgggttaaaacggtccgcgcaaaccgttcataaaacgtgattaatcgtttattagcccaaccgccatatagtttcgccaagtttaacggcatttcataatgtgaaatcgtaatcactggttcaatcttatatttcaaacattccgcaatcacggcatcgtagaactttaaaccggcttcgttaggttcaagttcgtcaccttgtggaaaaatccgcgaccaggcgattgagaagcggtagcatttaaaacccatctcggcaaaaagtgcaatgtcttccttgaaacggtgataatggtcaatccccgtatgattgggataggtataccgttgttcatcaatcgtccaatcaaaatcaggttgttggacaattttgaagcggtctggaccgcctggtaaagcgtcagcgattgaaaggcctttaccgccatcctgatagccaccttctagttgattcgcagccgttgccccgccccataaaaagccgtctggaaattttgtcatctaaatccctcctaatgtctataccaatattgtactataattttaaagcgcttactattattatccctaaaaaagcttaaccctttcggattaagctgtttggtgcgttagattgcgttcaaaatagcgatacgcaaaaccgatcagataaacgacgacgaccccgaataaaacgaacaataggcgttcgactaacatcacattcggcgttaacgacagcgagaaaaccgcggcattaagcgcattaaccgtattaaaaatcattttaacaaaataggtttttacaaacatataagcgtaactaatcccaattaataaggtggcaaagtaagttttcggtactaacactaagaataacaacgtgaaaattagcagcccgatgacggtcgccgtcaaccgttgccccgatttttgccgggtaagggccaaatcgggttgggttaacgaaataaccgttagcataatccaaccaaccttaacggcacctagccactgcccaaccagataggcgcagagaattccggcagttaatttaataatcaggctttgattctgttgcaaacttggtttgaaggcggctttttctaacgaatcgggccaatttttcgcgcgttcttttcgataaagtacagccactagcaccacgactaatccaccgactaaagcggctaccaatcgcggtccaattggtgtgcgatcttgttgattcaacgcaaataacatcaaaaagggaatgtaactttgatactgcagggtcctgaccaacactaatagaataattaataccgtgctcgccactaagaacagctttacgaattccggaaaaaccaatgttaaccaataagggaccaccgttactaacccgtaaaacgccggcaccagtaaccactgacgttttaaagaaacccctaatggcatttctttaaacatcaataacccagtcaacacaaacaccccaacgtatagacttgtcgggccaaagattcctttaaagcccccgataaaaaccaaaataaagactaataacccgaactttcgactcactaattgccacccttttttcacgacgctaactcctaaccactttttgataattaggaaacagtatacaacaaaataccgggcaaacctaattaagatttgcccggtacactgctttataaattctgcttggccatcattctttgggttaaataaccgaagagaatcatggcaataatttcaagaccgtaaactaaacaataatgtcccgtaatgttagtatccgcaatcggcacaaggttaacaatcaaattcgttactaactgatagacccaagttaaaccgataaacacgagaatcgcttttttagccccccgcatccaagtacaagctaagagcattagcgtgaccgttgttaagtatccaataatcaaatcaatcacgtataaaacagcatgccctttcgtgattgaatacgtcatcatcgtccataagctactgctgagttgcaatttaagaacgaatataatggctggaatcagcaataaaacgagcgccgctagtactgataaacaaattgctgcgactaattttgcataaaataaatgcttccgtttaatccctgaagccatcatcaacgctaacacatcgttattataatccaccgataagatatggaatggataccaatataaaagaataaaattagcgataattaataaaaagagactcagcattaggaaaacttcgatatcggcgctactaccgagcaacgcatcaatactttccacgttgattgtcactactgtccagataatattaattaaggccataatcccaaacgccaatagataggctttttcatggaagaatttaaagaactccattttaataattcgttgaaccgtcattttgtcacttccttaatttaacttgttattcaatgcgctgagcacaccgatttcattgatttcaatttgttcattcgccatctgtacctgtaatttagcccagttaggatctttaatcgacagttgaatgcgcccatcggctaacacgtcatgcgcataatccaagtccgttaaaatggcttgaacccgcacgttatcagtcgtgtccaaaatccgtaatttcttatcggtttcagccgctaaatcaattgtttcaatcaattgaccgtgatcgatgacaaaaacttctttgcataacgcttcaatatcactttgcacgtggcttgaaattaataaggtcatttcttgtttttcaaccaaggtttgtagatatgctttgaaccattggaccgtttctaaatctaaaccacggaatggttcgtctaagattaagagttctggttgatgtaataacgccattaatagaattaattttttcttcatcccgtacgaatacgttttaactttttgattgaggacgttgttaataccgagttccgtcgctaattcttgcgcccgattacggtcaaaattgccccgtaaaccactaaaatattcgagattaaaccaaccggtttggcccatataaacggacatgccatctaagacaattccgactttacccaaaacggcaggctgttcacgtacattttgaccatcaattttaatctcacccgcataattagtaatgatattcgtcaaactcttgaagaatgtcgttttccccgcaccattatgcccgacaatgccgtaagcgccgccgtctggtatcgttaattcggttaaatccagcgcgatgttattgtggtaactgaccactaagttgttcacttcgatttgcatactgatcctccttgcctaatgaattgtattataacgcttaaagatgacgaatttgtgaaggttaataaatttatggaaaatgagacaaaaaaatagattatgactaataactagacataatctactattttaggatgtactcagaagctgaccagctcagatcagcgctctaaacgcgcttttggttgcaacaacttccgcttaacctaaaatcaccaattatcttaagttcaagataaccggtgatttttgttaatgctcagttgctacccgcaaccaaattagcgctctgccttgaaacgcgctcctgagctagcttcttccgtctagctacaaataccgaaccatgactaaaggtcagtcataattcggtattctaggctatactcagaagctgaccagctcagtcacgctctatttctgaaacgcgctccttctcagaaactaccgtgagaactcacgctcttattcgtgtagttcgtcaaatccgaagaccatttctaggtgcattaggactgttgcgattaattcacctggcgcggtttcaatatacttaacggcccgacccgcatccataaaatccatggttctcacttgaaatggattaacactgcctcgcactttctctaacccattaatccgcacaaaatgctgtttaacattcttggttgacgtaatcgggcacacggcaatcatccccgtaacttgattataatcatcgttactgacgacaattgccggtcgtgttttttgaatttcatgacctttactcggatcaaaattaatcgtgacaatatcacctaattggggtgtataaccgatttttgtcattttcatatctgttcattacccgattgactatcgacactaaattctgaaccgatatcgatttcttgatgatcgaccacagcttgtttaaaaatattgggtgcctttttcacgaaagtaatcgcgtcatcgtgacctttgtaagcaacatactcaacatcactttgcatgttaaacttcgccgggacggttagaacagttgcattgccttgtttacgaattctcatttcaacgacccccttatttatctttattatagcgcttaaaaaaagtgaatacaatgtattcactttttaaactgttgcttattttaggaaggaccaacacgaatcagcgctctatctgaaacgcgctttccgagtagccttttccggttaacgacataacgggaattatgggtaaatcgcccataatccccgttattaggttaatcctcaaaacttaaccgcatgtcattagcgctctatttcttttctatcttagtcatgccgcccatgtatggcactaatgcttctgggattgtgacgctgccgtcttcgttttggtagttttccataatagcggcaactgtccggccgactgctaggcctgaaccgttcaatgtgtggaccaagttaacccggccttcttcgtcacggtaacgaatttgggcgcggcgtgcttggaaatcagtacaatctgaacagcttgagatttcacgatacgtattttgagcaggtaaccaaacttcaacatcgtacgttttagcggctgtaaagctggcatcgccagttgctaacgtaatcacgtgatatggcaagttcaatttcttcaaaatattttcagcattagccgtcattttttcaagttcgttaaatgattcttcaggacgcgtaaatttaaccatttcgactttgttaaattggtgcatccggattaatccccgtgtatcacggccagcactaccggcttctgaacggaaggctggtgataatgctgtgacgtaaattggtaattgtgcggcgtctaaaatttcatcgcggtaaaaattcgttaaaggtacttcagccgttggaatcaacgtcattggttcgccttcattggtcatcgtataaacatcttcggtaaacttaggaaattggccagtcccgaacattgattcattattgactaggtaaggcgtaatcatttcttcatagccttcttcagcatgttgatccaacatgaagttataaacggcgcgttctagacgagcaccggcaccacgatagtaaacaaaacggctaccagaaactttagcggcgcgttcaaaatctaggatgcctaatttttcgcctaaatcccaatgggcttttggttcaaaatcaaattgacgaggtgtttcccatttgcgttcttcacggctgaaactttcgtctgggccaactggtgctgaatcggctgggaagttaggtagacgaactaaaatgtaatctacctgttctttaacggcagctaatgcgtcatctaatgcttttatttggctaccgacattcttcatcgcgttgatttgttcagttgcgtcttctttattgcgtttggcaacggcaatcgcttctgaagctttattgcgttgttgtttcaattcttcggtttcaacgattaacgcccggcgcttttcatcgagtgcaatcacttcgtcgacttctgcggctttaatgccccgagttgctaatttgtctttggcccattgtgcgttgtcacggattactttgatatctaacatctaaatcgctccctttttaaaaaaatatataaaaaaagccttctcatcccctaaattgggacgaaaagacttcacattcgcggtaccacccaagttcacccgtcactaaagactggtgcccttcattgctgataacggtcagaagccgtgtagctattcactacccactattgcgctggaatgttggatttgatggcttgcaccgaccgccacttctctataaatccatataggcgcttattcgcgtgtttaaatcttgaccatagcataacccatttacgaattaaattcaatcacattctgttgatttttgtaaccaaagttcacgtagaatgccatacatccgaccataatggtcactatccgcgttccgacgccatttaaacatcaccgcttgtggattaacgtcgtctggcaattcaatactcgaggtcgtaataatcatatcggcgtctttcaaatccgcatcttgcatactgatattgacgtagcgaatcccctttaaatccgttaatagatctaaataacccatgtaagattgttcggccactaaaacaacgttgactcggtgtaatggcgctcgctgttggatcagctgtatgaaaacattgtagtaaccattaacgatttcatcgtgcatgtcctttaagaaatcgacatcactattcatgaataaatgatcaactgtatcttcaacgtcccgtttcaagagttgatcctcttttaaattcaaattggcatctaataagaaacggttaacccgagatgtcacgtcttttttataaatataagttgaagccgtcatcgcgattaacgtccgtttcaaaatatcgacttctgcgtcatctaatttcaagaaataatgaacgtttaacggaatccggtcaacgaaatccgagacaaactgattaatttcaggcacataacgcgtatgttgttcgccatcagctaaggcataccggttattgctatgcaaaaagatggggctaaaattaaacgtataatacatgttcagtgattctaacatggcctcttgatccgtcatttgcgctaaaatactgcgcatgcggattgcttcgcgggtaaatggccgcaccataaattcgtgagtcatattaggcactggataccgaataatatcttgcgccgaggtatctttaataaacttcttttgcatcacgcgatgataaatcacggccatcgcatacccgccgatttcacgagtcaatatattcggttgggctaattggaaccgttcaacagtcacatcaaacgcttccaaggcatcatcacgatcgattgcttcaaacggccaagaatgaccatccgttgccatccagaaaagcataatcaaaattaagcgaatcgtactttcatcgccttctaaacggattggatcataaaaaatccgaacatcaaaagaacgaataaaatcccgtaaactctttaaatgtcgtaaaaccgttgctttactactattatggtcctcccagaacgtctggaagcccatttcttcaccagtcaataatatttttacgaaatcataaacatcggacttgctgaccaatgaaaagtgataaacatcggacggcacgctaaatagtagctgtgtttcttccgtatcttgacccacaatctttttcaaatcgtcgacaatactcatatacatattatataaactgccataattgcgattcaaaagtgtcgcaacctgttttaaattaacgtcatcaactaatggattattatttctagagagttcaatccgctttttgaccggtagttcatcgcgctttaaactagctatatcaagcagtaaatcatatttttcacaatctgattgcatcagatagatattagtattgtccaccttttattagtcctcccaaagtgattcattatcattaattaattttaacactatttgaatcgtaaaaatagctcactataaataagttaaacaaagattgctttttaacccgaaaatgctagaatattctagtgagctttgctcaattaacactatatattgtataataaccaatagattaccacaatttgcagttaaaagagggagactgatgacattgctcgtacttgctggcacaatcggtgcaggaaaaactagcttaactaaatttttagccgatcatttgggcaccgaagccttttatgaatccgttgacgataacgaggtcctaccattattttataaggaccctaagaaatacgcgtttttacttcaaatctatttcttaaataaacgttttgatagtatcaaacaagcttacgctgatgataacaatatcttagaccgttcaatttttgaagattcattattattccatttgaatgccgatttaggtcgcgcaacggatactgaagtccaagtttacgattcattattggataacatgatgcaagaattaccttacgccgcccataaaaagcgccccgacctactcgttcacgtgcgcgtcagcttcgaaaccatgctttcacggattcaaaaacggggccgttcatacgaacaattggattacgatccaaccctttatgattattacaaggaattaaacaaacgttacgacgcttggtacgacgactacgatgaaagccctaagatgcaaatcgatggcgatcaactagacttcgtcgaaaacgaaacagaccgtaaaaaagtcatcaacatgatcgacgaacgattaaaaacactagagagtgactgagctgtttagcttttgagtatagcctaaaatggcgaattatgactgtcctttagtcatgattcgccatttgtagctagacggaaaaagctagctcaggaacgcgtttagagcgctaactcagccgtttaacttctgagtatccaaaaaaaataagcacttaatcctcaccgtctaggaggattaagtgcttatttcaatgcttttatttaatcatttttcttacggcgataataatacacagcgccaccaatgatgattaatccaagtccaatccaaacagttgccttcataaagtcttcacctgtttgtggtaacaatcctgttttgttagattgttttggctgattaggtttgttaggtttaaccttatgcggtacccgttgattgacgaagcgaccaacgttaaccattgttggtttcccttttgcactggcttgaatctcaaagttaactggtgacgtctttaaaacataaccagttggtgccttagtttcaatgaaactgtattttccaggcgctaagttctgcacggttacaattccttgcttatccgaaataacgtctgataaaccgttaactgtttgaccgtcattatcgaccaccttgaaatgcgcacctgctaatgtttgaccattggcatcagtcttaattaacgttgcacttccttgataattaatgaaatgggcactcgcagtgaccactgctggtttgccaacaacactcgcttgaatctcaaacttaaccggcgttgtattgagaacataaccggttggtgctttggtttccacgaagctgtatgtgcctggcgctaaaccagttgctttcactaaaccttggtgatctgaaactaaatcagattgacctttaaccgtttgaccatcagcatcaatcaccttgaaatgcgcacccgctaacttttgaccatcaacatcggtcttaattaacttcgcatcaccttgataattaatgaactgggcactcgcagtgaccacttctggtttgccagccgcgctatctttaatttcaaacttaactggcgtttgatttaaaagatagccagttggcgctttagtttcaatgaaactgtaagtcccaggtattaaatcagcggcttttacaaccccttgattatccgaaacgatatccgctaaacctttaaccgtttgaccgctagcatcaatcaccttaaaatgcgcacccgctaatttttgaccagcaacatcggttttaatcagttgagcactaccttgataattgacaaacgcgcctaaattaacaatctctggacggccaatttgagctttaatcgcgaaggctctaggtgttgtatctaagatataacccgttggtgctttggtttcaaccatcacataccgaccaacttcaagccctttaaagacgaatttaccaattttattggtcttaatttcagtcgtcttttgtccattcacatcataaacttctaacgccgcaccggtcggttgattattttgacctgctttgaaaacttgataaacggcacccgctaacccagctttgtgttcgtttgttttctgaccttcaattacagattgataattaggaaaattcaagttatcaatcacttgattctgatcatcattcttagtaacaacaaagtaaacgggttgcgcattaattaaacaacctggtgctgctttggtttcaatcactttatagttcccgactggtaaattatcaatattcaacacaccattttcagggacaacaatcttcttgactaatgtttcttcaccgtcaataatccgataaagttcgaattcggcgcccgccacttgaccatctttgacgatcttcgtgattgctgctttacccttaaagttttggaaataacctaatttgaaaacttggggatcacccgcaaatttatcaggaatgaccactttaattaaactgtcattcacgacataatcgtgctgaccatctaatttaggcgcttttgtttcttgataataatacgttcccggcgctaagtcggtaaatttaacgaccccaaggttatcactgattacttttttattcagcggcttcttttgactgtcgtacaacgtaaattcagcgccttttagcgtatggaagcttgtatcaattttgacgatttggaaagcccctttgtaattaataaaggctttggcgacctgtaccacacttggttttccgtttgcttgattcttaatcgtaaaatcaactggatcagtattcaatagataacccgttggtgctttggtttcaataaattggtagtcacctggcgttaaatcagtgaccttcacaatccctttagcgttcgacgttaatcccgtttgaactgttttaccttgggcatcaacaactttaaactcggcacccgctaatttttgaccggttttattttctttaactaattcggcactcccacgataattgacaaaattatcattagccatcacggtttgtttgccttgatacttagcctcaattgtaaacgaaaccggcttcgtatttagcagataaccggttggtgctttggtttcgacaaattgataatttcctggtgctagattttcaaccgttacttgaccttgttgatttgatttcaacccagcctgaaccgtttgaccctttgcatcaacaaccttgaattcagccccagctaatacttgacctgtttctgatttcttaattaattgcgcggcccctttgtaattaatcttgtcgcctaaatcgacattcggaatttgaccattgtctttttgacgaacaacaaatctaattggcgtcgcatctaatacgtaaccggctggtgctttggtttcaaccaattgataacgacctggttttaaattttcaatcgttaattggccgttcttatccgtgactaatcgttcgtagcctttaaccactttatttttagcatcccgcacttcaaattcggcacccgccaatgcggattgtacggtttgcccagcattattcaccagttcaccttttttatgcatcgtcactttggtaggttggttcgtaattttttgaatcccaaacgtattggtttctgtatccttttggattgtgatttttttaccttttaataattcgtcactaatcgtgtagcccgctggtgctttggtttcaaccaatagatagtcttgaacccgcagattgccgagttttaattgacccgcggcatttgtatcaccctcacggaccaatttatctttttgaccgtctttaccgattgtccataattgtaaatgagcaccggctaatttttgaccctctaggccttgtttaaccaacgtaacggaccctttagaaccttctgccgaaccaccactgacaatcactgacgtgtcagtttcagtttcttgtttgtcttaagttcaagataattggcgattttctgttaatgctcagttgctacccgcaactcgacgcactcatttatctaaaaatattccggtttgcgacctctttggagaccacttcacccgcgaccttacgccggcgcgcttggcggaatagaaattcaaatttagcctgttgcaatttgctttccatttccaaagttcgatccaatccacgaacgttttcctgtgttttttgcgccaactgccattgatctttgactttaaaaaccaaatcaagaagtgcttggtcgccatgttcttttaacgttggttttcgctttccaaacatcctaatcccaccgtttctatatttcttgtcggccttcaaccgcttttaaaagcgtcatttcatcggcatattcaatatcactaccgaccgctaacccatgggctaatcgtgtgactttaatgccggccggtttaatcagccgtgaaatgtacatcgccgttgcttcaccttctggggttgcattggtggcaatgatcacttcttgtgccggtgttttttgaagtcttttaatcagattcgcaatattgatatcgtccggtcccttgccttcaatcggcgataagaccccgtgtaagacgtgatagagaccgtgataatcgttcatgcgttccatcgacatgacgtctttaggctgttcaacaaccagaatcatatcttgactccgcgttgtatcgcgacaaatttcgcacggatcatcatcggtaatgttgccacacacgctacaataatgtaaatcacggcgcgcagaaatcagatttttggcaaaattagtcacgtcatcctcattcatatcaatcgtataaaaagcgagccgtgtcgctgttttactgccaatccccggtaatttcatgtaactttcaattaacttcgcaattggttctggatattgcatctgtgcacttccttattaaggctagagtgggagacctttagtaaacttacccatttttgcttgggtttgttggtcgatattacccatggcttcattgactgccatgatgattaaatcttgtaacatatcgggatcttcagggtccatggcttctggcttaatcgcgatatccttcatcttcttgtcaccggtcatcgttacaacgaccatgtcatcagaggcttgaccaacaaattcagtgctgtttaatgcttcttgcgtttggcccatttccttttgcatcttttgcatttgtttcatcataccttgcatattacccattccacgcatattaaaacttcccttcaatttttaattaatctggttgaacgacaaccgcttcgccaaataaatcctgtgctttttggacaacttcagctgtttttggttctgctggtgcctggccggcttcagccggtgttgattcaccatcgccagtcacgtcatgattttggagatattcttgtcgaatatccggccaagaatcatgcggcactaaaacgactttaaacggattacccgtcaagcggtttaaaccactttctaacgtcgttaataattcttgatcattgttcgcccgttcaaataaaatcgcgtagttgaacgccacaacgaccccaccttgactcgctgcaacgggttctgaaaccttcatcacggcgcgtttagtgacgtttaacatgtttaatagatctggccaaacttctttcagttgttctaagttcgcacgagtggcgtccgccaacaccggataaatcgcttggcggttgatttttttattgattttcttagccggtttggctttaggttgcacgggtgctgccggttcattggcggttagctgggcaaccgttgcttgtaactgcgctaattcttgctgcaacgcgctgacttctgctgaatcagccgacgcaaccgttgtggccggtgttgaaaccggattagtcgtcaccggttggggttgcgttaaacgcaccgtcgcaacttctaaataaatttctggatgattggtaaagcgcaattgttgctgcgtttcattcaacacatcaatcaccgcatataaccgttcggctggtaattgcgtgctgagcgtcttaaaatgttcatccaacaagtccatttcgtttgcgagaactaattcgggtgcttgttgatacaacagcaaatcgcgactatattcgattaaatcttcaataaaccgttgggcatctttaccttctgccaaaatctgttgtaataaggccaatgcttttttagtatcactgtcttgaatcgtttgcacgtaatcagccaacattgattcggttaaactccccgtcacgtctaaggcgttttcgagggtcacgtgattatcgctaaaggataacacttgatcgaggatactgagcgcatcccgcatcccaccttcagccgctttcgcaatcacttttaaggctgcgggatcataggtcatctctttttgatccaagatgtaggccattcgtttgaataaatccgctgccgtgattcgtctaaagttaaaccgttgcgtccgcgaaataatcgtggctggtaccttgtggacttcagtcgtcgctaaaataaagacgacattggctggtggttcttccaaggttttcaataacgcgttaaacgcaccggtggataacatgtggacttcatcaatgatgtaaattttataatccgcttgggtcggcgcatatttcgctttatcccgaatatcacgaatctcttcaaccccattattcgaagccgcatcaatttcaatcacgtcgttcaacgtccccatcgtaatcgcctgacaagtcgcacattgattgcacggttcgccatctttttgatgatgacagttaatcgccttggcaaaaatcttagccgccgacgttttccccgtcccgcgtggtcctgtgaataaataagcgtgactcgtttgttgggtcataatcgcgtttttcaacgtttgggtcattgtttcctgcccaatcacatcgtcaaaacgttgtggtcgccaaacacgatataaagcttgatagctcatttaattgcctccacccttttaaaatatgacagctacgccgtttaaaaactactggttctattttagcatattttagcggctttttaagacccaatgcactaaaaaaggattaagtcgttagacctaatcctggttaattttacaaaaacttaagacacatgataaaacaaacttagtgctgctttcttccgaatctgacacgattcgtaggctcatcattgtctcaaggcctttcggcaattactattataactgattttactttaaattactagcgtttttcttttttagccgtcttttggcccgaatcgctttaaaaaaagtctgcaagagcgccgcacattcggtttcgcgaatcccacccgtaacttgcgcttggtggttaaaccgtgtatccgtcagtaaattcattaacgtcccagtcacaccggccttcggatcactcgcgccaaaataaacattgggaatccggctattaataatcgcccccgcacacatcggacaaggttccaacgtgacaaaaattgcagtttcttctaagcgccaactcttggcgaccatacacgcttcttgaatggctagaatttcggcatgcaacgttgcatcttgggcgtgttcgcgaatattatgcccgcgaccgataatttcgccgttgtggacaatgacggccccaattggcacttcaccaatgattcgtgcttggttggcttcatcaatcgccgcttgcataaactggtcaatttcggtttcagtatacgccattctgcatcacaccctctcagttagtctacattctatttaaccatacaccgttttaacctgcaattcgggttgcgagattaaaacaaaaattaaccattatcttgattcgataatggttaattagggggcgtctgagtcagcgcttcgctcataacgtgcctttgtgttgcaacaacttccgcttaacctaaatcgaccaattatcttaagcccaagataactggtcgatttctgttaatgctcagttgctaaacgcaactcacggcacttcttttttacgtgctaactcagccaacttcttccgtctagctacaaataaagaactgcgaccaagaccgtcacaattccttattttaggctatactcagaagttaaccggccgagttagcaacttcttttaatgtgcttctaccgataagtttctgtgcttagctacgtctgtcaaataaagtccatagaccggactttattcacccgactaggctaatgctcaaaacttgaccatcggtagaagcaacttcgctcataacgtgcctttgtgttgcaacaacttccgcttaacctaaatcgaccaattatcttaagcccaagataactggtcgatttctgttaatgctcagttgctaaacgcaactcacggcacttcgctttataaatgttcttttacctttgttgcgtaggctgttagggtttgtcgtagatcattgaccatttctggaatattatcggtttgttcgcctaatttgtcctttaaatcgtttaatttatcggccgcattgagcaagttattgacatcagtatctgataattgatccactaaagctaaagctttttggttaccgtgtaacttttctttaacgaagcttttgaccgctaaacgtttccgataacgttcaattttttcaaacaatgctttggaacccacaaaagcagttgtggcaccaatcgctgctgttgcgccaacaccaattaatatcttatatctggttttcatcatatcgacctccttgctgatacctttatgatagcatattcagctcagatttaccccggaaatagccttaagcttccgttaattttatgctttgtaaaatgtaatagcctttatccttgtgaatgatttgaacgttaccaaaaacggtttgcatcgtcttcttggcagaaggtgccccctgttttttttgaatcaccacgttcaattcaccttcgggcaatagatgatcgtaggccccagttaaaatattttgaaccacatctttaccggcccggattggcggattagtgtaaatcgcagcgtattgatccggcacgttttgatattcagctgattcaaaaatacgcacgttctcgattttgtttaattgacagttggtttgtgctaagcctagtgcgcgttcattgacgtcgaccatatcaatgcgccgtttgggtgccagtttggcaatcgtcatcccaattgggccgtaaccacagcccatatctagtacgggaccgtctggtgcttccgctaaatcgacggtgtctaataacacgcgtgacccataatcgacggtgttcttcgaaaagacgccgttatccgttgtaaatttaaagttaaaaccccgtaattcaaagtcccaatttttttcaaaatgggccacttcaggattcttagagtagtaatagtcagtcattgtgttaacctcatttatttttcagtatcggataaattaccaatctgcacggaccggattaaatgtccaaccaccccgtgttgatgcggttgctcggtcactttttgattaacgaccaataatatttgtaacatggtaaaaatcaacgaactgcgtttttgatacgcaatgtatttcggtaaccacttagtcgtgtacttctgtttataggtccgcaacccttggaagccgtaaaaatgataaccatattcgtagattaaatgggccaaccgttcttcaataaaactgaattctgaagtcccgacgttcgccaaaggtgccatgcctaaattaaagtattcgtaacccgccgcttgtttctcttggaaaagattaataaatatctcatccattataccagatggggccgatttgcggtgacgcattaaatcaatactcgttatagattgcgtcccagttggcatttcgttggcaaacgccacgatttggccgtcagtatcgtagacgacggcaatgggtgctttttgtaaataatcagcatcgaagaaccctaatgaaaagcccttttcagcgcgtccatctaaccaatcgtccgaaacaactttcaattccgccaataaatcagtatcgaacggtggttctaaaaccttgaattgatagccttcacgttcaaatttattcatcaacgcgcgttcagcccggcgttttttgccggttaatgtgaagtctgccaaccggacgtaaccctcttcaccaaacttgatgaagtcaaacccaatttcatgtaactgcatcgttaattcagccgaaatttcataaaaagctaaatgacaatcgattaaatccgcttcacgcatcaattgttcaatcgccaataaaattttatccggattgccgatcggttcacccatgatgatcaaccgatccgctttcttgcggtataacaagaaaacttgatccgtcccctcttcttgatagaaataaacggctttatcttgcagatacgccagatgactaacttcattgccaccaaactgttcaatcaccgcctgaattcgagcttcatcatacggcgttgctaacgtagaccgtccgccacgactcaaataacgaaaaactaagaataaggttatcgcagcgactaacatcccgataaaaccgagtaaccagatacgttcagacggaaataataacgccgtcggaatcggtttgcgccggtgtaaatggggtgaattggtaattccgactaatgcgtagaggataaaggctccggcaaacaaactgccgtcaaccaatcgatcgctccacgaaaattcaagtcgttcacgatacaattcgtgttttaataagacgctcgccactaacactatcattaggaaaacggccagtttgattgaaaaatcacgccaaagcgtattgataatcgcaatcgttaatagcaccatcaacggccaataaactttcttgacccggttagcgaccccacgcgcgaggcctaacatcacaaaggccacgataatgttggtcacccgatctaagaaaaagaaggtgtacggataaagccgaccaatcaccgaattcgtgactgcaaaattaggcaccgttgcgacgactagtagaataataccggagaaatataaaaagaagacgatgaaacggtgtgccattttttggagcatctgtcggggtaggccttgtaaatattgattcaaccgactccccgcatcgtgggtaaacaacccaacgccgactaagaatggcacaatgtaatagaaaattcggtagaaggacaaccaaacaacggcggtcgcattgccgaccccaatggcacttaacccaaagatcatgaataaatcaaacgtccctaaacctccggggaccatcgaaatcacgccgataatattagcaatcatgaataatggtaagacttgcaagaaattaatcggtacttctaagaaccagccgatgattaagaagaaactgcccgcgaaaccccattcgaaaaatgagcccaacgttaagcgtaacacccgttgaatcgataaatcgctgaaaaagctcgcgttctttaaccgggtactcattaataggattgggaaatacagcgccccaccaactaaccataaccagtaagtcgcgtatacccgaccgatgccaaatccaaagatcaaaataaaactaattaaacaccagattgacaaaccggctaataaaaagagcgcgattttagaaatcgccatcaagatttctttttgagtcgcctttttaccatagaagttagcccggagactggcccctaaaaaaccgccaaagccggcgatattcgtaaatgaattgacgatccaacccgatttcacttggtacaaaaacgaataatcttctggtaacaactcactaatcacaaaatcgtaattgagcatcggcaagaccgcaatgaaccccaggattaacatcgcaattaaggttaacgggctttgcgtcgttaaactttgccggatttgttggccgtttaaatctctaaaaatacgaccgacttctaaaataacaaacaccaacaccgacaaaataaaaatcgcttttaacaacgtcaaatgtttttgaattttttgataaaatcgttgaccccaatttttcatctcgaactccttttagtaatgattagtttcattataagcgattaaactcaaaatctcagctaaatgacaattctgttagttaaattcacaattaagttgattgcaatcgattttcagcgcacaaaaaaagaaccgagcgaatgcccgattctttttgattaacttaaattacttcaagttaacgacagcgccaactgcttctaacttagctttcatttcttcagcatcgtctttagaaacatcttctttaagagctgaaggagcgttatcaactaagcccttagcatctttcaagcctaagcctgtgatttcacgaacggctttgataactttaaccttttcttggccgatttctgataattcaacagtaaagctgtctttttcagctgctgcgtctgcaccagctgctgctgctgctactggagctgctgcagaaacaccgaattcttcttcgattgctttaactaagtcacttaattctaagattgatgattcttttaattgatcaacaattgcatttacgtctaatgccatttttgtttcctccattttttgggtaatttttggtgttacaagactgcaaaattatgcagctggttcgtctttactgtcagcaacagctttaacagcatatgcgacattgcggactggtgcttgtaatacagaaagtaacattgataataaaccgtcgcgacttggcaatttagacaaggcgtcgatttcatcaagagtagctactttaccttcgatcatgccgcctttgatttcaagtgcttctgcacctttagcaaattcagcaataatcttagctggtgcaacaacatcttcgttagaaaatgcaactgcagtagggccagagaatgtttcatctaaaccttcataaccagctttgtcagctgcacgacgcaagtaagtgtttttaacaacttccatttgtacgccagcttcacgcaattgtttacgtaattcagtcacttgttctactgttaaaccacggtaatccatgacaacgatagaaacagcactattgaatttttcaagaactgcgtcaacaacttgggctttttgtgcgatgattgtttcgctcaattgattcacctccattagatttttaaagcttgtggtcaagagtttcttaaataaataaaaaactccatgtccaccaagacatagagagggatttcaacgtatcttcctcggcaggatattaagccttacggcacctgagtcttcggtagcataaataaccaaatacaaatataccattgattcgactaaacgtcaacaaacttttaaactgaattaattttacgtaatcattagctatcacttattttatttttctgaaaagacagtataatattaagtagaatcatgaaaataaatcaagaggtgtttcaatttgaaaaatatcttagtcattaacgctggtagctcatctttaaagtggcaacttttccagcacactaacttgaccatgattgccagcggcgtcatggaacggatgcagacacccgaagcgcgttttacattcaagtatcaaggtcaaaaagaacaaacgaaaatcgctaatctttcttatgaagatggcgtcaatcgcttgttggcaacgctccaagccaacgacattatccaaagccctagtgatatcatcgctgttggccaccgagtggtcgcgggcgcgacgaccttcgaggcaccaacactaatcaccccagaaaacttgtccacgctaaaggcgctggataaatacgcaccactccacaatcccgttcaagtcgactgcatcgaaaccttaatgcgcgtcttaccggatcaaacccctcagattgcggtctttgatagccaattctatctcgacatgcccgcagcaacgagttattacgggttaccttatgaagacagtcaaaaataccaaatccgtaaatacggtgaacacggtattagtcatgaatacattctccacgaaaccgcacgcttcctccaaaaagacgttcacaatttgaaattgattacgttgcatctcggtggtggctcttccattactgctagtcaaaatgggcatccagtggacacttcgatgggcttcaccccacttgaaggtctaccaatgggcacgcgcgctggttcattagatgcggcgattgtgcccttcttgatgactgaacgccatcaaagcgctgaagaaattatcaatcgactcaatacccaatctgggattctaggcgtctctggtatctccgccgatatgcgcgatatccaagtcgccgtcaccaccaatccgcgcgctaagctcgcttatgagatgttcatcacgtcagccgctaaattcatcggtagttattacgttgagatgggtggcaccgacgtgatcaccttcaccgccggtatcggcgaaaatgacgccgtcacgcgcgctgatatctgtgccaaattagccgttttaggcgttcagattgacgaggaccgtaatctgaacggccgcggtccacgcgtcatcagtactgacgattcagcgattcaggtcctgatgttaccaactaatgaagaattagcgattgccaaacacgttaaaactaaattgtaatccaactcatttaattcttaaatatcaacacaaaaaagcacccacctaagtggatgcttttttaattgattgctaattagaaactagcaatatcaactttaacaccagggccaaatgttgagcttactgataagcttgtaatatattgacctttagctgatgcaggacgtgctttaacaatcacgtcttgcattgtcttaaagttttctactaatttagcagcatcaaatgatactttaccgattggtgcgtgaacgataccggctttatcaacacggtatgccacttgaccagctttaatgtcgttaacagctttcgtaacgtccattgtaactgtaccagtcttaggattaggcattaagcctttaggtcctaggacacggcctaaacgaccaacttgagccatcataggtggtgttgcaactgcaacatcaaaatctaaccagccgccttggattttttcaactaaatcttctgcgccaacgatttcagcaccagcagcttcagcttgttttgcttgttcgccttgagcgaaaacaatcacgcgttgtgtcttacctgtaccatttggtagtacgacagcaccacgaatttgttgatcagcttgtttaggatcaacgtttaaacgatatgcaacttcgatagatgcatcaaattttgcaaaatcagctttctttactaaatcaactgcttcttcaacagtatatgtcttagtagcgtcaactaattttacagcttctaaataatttttaccttttttagccattagggttttcctccttgcaattgtggtgaacggtttttgacctcccacttgatttttcaactttcattgaaaatccgactgaaagtgtcaaagtatggttttttaattagccttcaacagtgaagcccatacttctagcagtaccttcaaccatgcgcatagcagctggaacatctgcagcgtttaggtcttgcattttagtttcagcgatttcttgcacttgagctttagttaccgtagcaaccttcttagtgtttggttcgccagaacctttttcaacacctgcagcttttttcaataaaactgcagctggtggagttttcgttacaaagtcaaatgaacgatcctcgtatacagagataacaactgggattaataacccaacttgatcagctgtccgagcattaaagtcctttgtaaagcccataatattgataccggcttgacccaatgctggacctactggtggtgctggagttgctttacctgcaggaatttgaagtttaacgatgtttgttatttttttagccacgaaacatacctccttaagtccgtgatgtggttaagatggcccttatatttggcctcccactaatgtatgaaaacatactagaacactatatcaagtaatcgttggaaaagcaagctttattcgccatggcgggtccataaaaaatcacaaatcgcttgatcaactaaccgattctcgtgcaacatactgtgcgcgcccccaggacctctgactaacatttcttgataggccgtcacgcggtctttcaacaggctgcggagcgcaaaactactatcaaccgcgacggacccatcatggcgattcgtgcccaataattcccccgcgatattcaaaatcgctaaatcaggtggaaactgggtcacccgttgcgctaaatactgatagttcttggttttgcggattgggcctcgttgggtgagttcactccaaaaaacgcggtccgtatcgggcccgatcgaaggatcgttgaccggtgctgccatcaagatcacctgttgaaccggaatgacttggggtacgagcaaatatcgtaaaaccgtaatcgcgcccatcgaatgaccgactaaattaacggcttcgacatcgtaatccgcttgtaaggtggccataatctgttgcaaccagcccacttgaacttggacgtcagcgtggttattagcgaacaagacctgaatcgttggattgaccgcacttaagcgtgacaaaccactaaaggttaattccccacgcttcgacactttaacgaccaacgtcttttttgccagccccattttctgaagccgccccaataaatggccgaacgaatagcgattgcctcgatagccgtgaatgaacagcgtcggggttgtcgtgtattgcgctaatttaggttgccaccaatgttgtacatgcccgactcggtggtaatcccagctgaaggttaaaccacctaatccgaccagactacccaatataattaaaataacaataatagattgccacatataagccacactcgattcaaaaataggcgttaactcaaaattgagctaacccccacttgtttatactaattcgtcaacttgatcgtaatcgagttcagttgctgtttcgcgaccgaacatatcgatattgacctttaatttcattttttcatcatcaacttcagtgattttaccgactaaaccggagaaagcaccttcgataattttaacggaatcatcaattttgaattcaacatccaaatgacgcgtgctcatccctaattgacgtaaaatttgggtgatttcttcgtctaataatggggctggtttactaccggcaccgtgtgaaccaacgaacccagtgacaccaggtgtattccgcacaacgaaccaagcttcatctgacatgaccatttcgactaacacgtaaccagggaaagtcttcttcatatcaactttatctttaccgttcttgatttcatgttcttcttcttcaggaaccacaacacgaaagacgttattttccattcccattgattgcgcacgtgattctagattttgtttcactttattttcgtaacctgaataggtatgtaggacataccagcttttttcgattgattcaaccatgtttgttctccttttaaataccaaaataaaaaaacttcgaccacgcgaagtttttttgcttgccatcagtatagcaaatccagcttaaattagctagttttaaaaaataaataattgtaatagttccaaaataaccaagtcaattacgccaaagaaaatagcatataaaactgacgtcataatgacggttgatgaatctttacgtgtctgtttggcgtctggccaagcgacgattttcatttctgctacaacgcttttaatgaacttaatcatgctgaatcctcctgctagcgagtttctttatgttgcgtatattgtccacaatgtttacaaaatttatttaactctagacgttctgtccggttcttgttttcagcaacgtaatagttacgtgaaccacaaaccgtacagcctaaggcgactttcttaacacccatgactaaaagcccctctctttttgatgtttatcccaattactttatcattcattttgatgactgtcaatccggatcattttgataatactgttttaatttcgtccgacagcgcgactggccgcgttctaattgcgctaatgtgcaatcgaactgttgacaggcctgatcgatagccaacgtcccactcaaaacgcgaaaactcatcagttcaaacggtgatagatgttcaagataggccatcaacatggtttgagactgatagtacgcggctgaattttcgccaaccgcccgtttttctggacactgagcacacaatagcgcttgatgatcaatccgacgtttttgggccagttctttacgtaacaaattatcaatatggtgttgaaatcgcaatttataaaaaccaccaaagcttttaccacaatgacaatcatagcgttgacacgtttcaaaacacactagccgagcttcttgaagccagtcttcatgttcgaaaagccggatgtaatacggtgcgtacgtatggtagaccatcggtaaataagttttaaataaaatttctaaagcatctgaatctcgatttaaaactgctgtaatcaattctgtatcgcgctctgttggtttcgtcattggaaacacccctttgcgcaacaaccacatcttcattctaacaagcacccgctactttagtaagcgaacgcctgtttaatcaggatttttggcactcaactgatcacgcatcttcgctaggaccgataattgttgttccgaccacggccgattaatctgcatctcacgatcatgataatgtttggcatcatgattaatctcagtcttagcccgttcaatctcgcgtttgaaatcaggtgatgatacccgtagcgccccacgcgaaaagatggtccactgttcggcttgatcactcgataccacggtcacttgggtaatcggcgacatcagtttcgccgctaagatttcaatataactatccgccgtttgttcctcttgtgtgaagacaacctccaaattatattgttcataactttgtttaatgcctggtacgtacatcgcatcaaacaccaaaataatctcaatctcacgatatttgcggtattccgctagcgtgtgcaataaactatcgcgtgcatcggcaaaccgatcactctgtttcagtttattgagttccggccaattgccgatgatgttatagccatccgcaattagaatttggcgtttcatactttaggggccaagggttgacgactgttgtaagcttgatacatcaaaacacccgcagccacactcgcgtttaaactttgaacgtgaccgaccatcggaatcgtcaacgtttgatcgacttcttttttgatgattggtgataaccctttaccttcattaccgatgattaatccgattggaccggtcgcatcccattgacggtaatcagcacccgccatatcggtgccgaaaatccacaaaccacgttcttttaattttttaatttcttgcgttaaattcgtgacccgtgccactggtacgtgttcgatcgcgcccgttgaggtcttagcgaccgttgacgttaaaccaactgctcggtgtttcggaataataatcccgtgcacacctactgcatcggctgttcgcataattgaacctaagttatgcggatcttctaaattatctaggattaggataaaaggcggttcgtctttcgccgctgctttggcaaaaatatcgtcaatcgtggcatattcaaacggtgcgattgcaagaattatcccctgatgattttggcgatcgctcaataagtccaatttgttcttcggcacattttgaatgactaaccgtttttctttggcgagtttcaaaacatcgtgtacaaaatcagcttttaagccgtcttgtaagaaaatcttgttgaccttagtggccgcatccggtgcttttaacgtttcgattgaagcgtgtttgccgatgacgaaatccgtttgttcttctgtattttcagtttcaactggttttggtgcccgcttttccggcattggccggcgtttaggcttcccaccattattcttctgactacgttgactattaaagtcattgtcgcgttttttagggtacggtttattagttttcatgcgtcctcccgtcgtcgacttgttgaatgcaccattgtgctaattctgcgacgcgtgcttgttgtcctgttaaatagagataaccaaaaacggcttcaaagccggttgaggtccggtacgtggtgacactggtattttttgccttcgtataactcttagcgttgcgcccgcgtttaaaaatattgacttcatcttccgttaagaaatgatcgtccatcattaaaccaatcagtgcggcttgcgccttggcagacacgtaatgcgtcgcgacttgttgcaggcgggttggtttggttaacccttgttctaataaatgggcacggacgtaaacttcataggctgaatcacccatgtaagctaacgcaatcccgtttaattgtaaagcatctttcatgcgcgtctccatctcattccttgtggcgtatcttctaacataatcccttgcgcctttagttgatcccgaatcgcatcactcttggcaaaatccttagccgcccgcgctgcttgtcgttcggtaatcaattgttcgatttcggcgtccaataattggtcggccttaaacgctacgccaaaaatcaataataaccgttctaagcgttgtgttaaatcggtcaacgtagccgtttgaacaacttcattttctaaatattgattactcaatttcgctaaatcatacaacacggtcaacccgttttggacgttaaaatcatcatccatcgccgtcacaaaggcgtcttctaacgcggccgcttgttgcacaatcgtttcatctgaaccagcttgcgcggttttttgacggaaatcaagattattgagcgtcgtctttaaccgatcgagattaatttgggcttccgctaataacgtttgactgtagcgaatcgggcggcgatattgggtactactcatcaagaaacgcagcgcttgtggatcaacctcttgaattaaatcatggaccgttacgaaattaccgagtgatttactcatcttctgatcatcatcgccaaccgtcacaaaaccattgtgtaaccaataattgacaaacttctgaccggtttgggcttcactttgcgcaatttcattttcatggtgtggaaattccagatcctgaccaccaccgtgaatatcgatggtttgaccgagatacttcgtcgacatcacggaacattcgatatgccaacccggccgacctttgccccatggtgattcccaagcaatggccgtgcccgtttcagctttccacaacgcaaaatcaatcggatcttctttgcgtaacgtttcttcagtcgccgtgtgttcactggcgccttgttcgagttgatctaaatcttgacccgccaattgaccatagtgagcaaacttgcgcgcccggtaataaacatccccgtcaactgcgtaagcataacctttagcaattaacccttcgataaaggcaataatctcgggaatattttcagtcgcccgcggattagtcgtcgccggttcaatattgagtgccttggtgtcggctttaaacgcattaatgtaacgttcagctaattctggcaccgtcacgccatcacgatcagccgctttaatcatcttatcgtcaacatcggtaaaattcgacacgtaattgacttggtagccgcggtattcgagataacgccgaatcgtatcaaacgcaatcgcactgcgcgcattaccaatgtgaatatagttatacaccgttggtccacaaacgtacatgctgacctgattcgcttcaatcggtttaaaaacttctttttggcgcgtcaatgtattataaacagttaacatagcaatcttcctttcccttaatccaaataaaaagcgccctttgttaattaacaaaagacgccgcttgagcgtggttccacttttctttgcaaaaatgcctcaaccagataacggtgtcccgaccaaaactactgtcttcatcttggcatttctgagatgcatttcaattcgcctcattacttcttcacagcatccagaagctctcttggaattcggctaaatttacttcttctcgtcattaattttacgtacaatagattgactcaataataccgattattcatgaatctgtaaagctatctgctgaactatttttctttaatccctttttgttgatgcgccggtttagcaaaaatcattcgtcccgccgccgtttgtaacgcactcgtcacgatgacgtctaacggtttattgacatagtgttgaccatcttcaacgacaatcatcgtgccatcatccaagtaagccacaccttgttggcgttcggtccccgtcttaacaacggtgacgcgcatcgcttcacccggtaaaacagccggtttcaacgtgttagccaattgattaatgttcaacaccggcacgttttgaaattcgcaaactttgtttagattatagtcgttcgtcacgacaatcccgtctaatagcttggcgagtttcaccaacttactatcgacttcggtcaaatcttcaaaatcgccatcgtacatttcaacggctatcatttcatctttttgaatttcatttagaatatctaagccccgccgaccacgcgcccgtttcaggttatccgcagaatctgaaatcagctgtaattcgtgtaagacgaagttcgggaccattaatgtcccttcgataaaaccggttttagcaatttctttaatccggccgtcgataatcacactcgtgtctaaaatcttatattttcgaaaattatcatcaattttgcgttccaaaatatccgtattccgttttttgggttgcattaaccgacgccattcatctaaacgcgtggttccgattcgaaacccaaaataaccgagcgcaatcatcaatagaattgggaccacggtattcaatgcaaaaattggcatccggtataacggaatcgaaatcacgttggccaacaataaaccgactaaggaaaacaaactcccaaacagaataaagcttggtgattgtttaatgaccgccttttctacccgccgaatagcgcctaaaatgggttgggccaatgctaagaataataaataaaaaataatagcccctaatattgcattggtcaccccgttatttaaatagacgacatggctcagtctaacgattacccataaaatcgggaaaatcgtaatgcctaacgccgcgcctaaaacaacggcgacaattcctaatacttgttttttcgtaagtgtttttttgttcatcgttaacccccctctcgactaaattgttccttagttaaagactttctttaatgtttccgcaatggttgtcacgccgaccacctgaatatcagttggtggattccaaccttgtagattattttttggtaaataaatccgtttaaaaccgagtttcgcagcttcactgacccgttgttcaatccgattaacacgccgaatttcacccgtcaaaccaatttcacccacgaaacaatccgttgctggaatttctttatcacgataactcgaggcaatcgaaaccgccattgcgagatcaattgctggttcatccagtttaacgccgccggttgctttcaaataagcatcctgattctgtaacatcaagttggcccgtttctctagaaccgccatgatcaacgacacccgattatgatccaaacctgaagacgttcgtttagcgttaccaaacagcgttggtgtgattagcgattgtaattcaaccagaatcggtcgcgtgccttccatcgaaacgacgacggctgatccagtcgcaccggctagtcgttcttccaaaaagatttccgatggattggcaacttcttgtaaaccagattcccgcatttcgaaaataccaatttcattggttgacccgaaacggtttttgaccgaacgtaacatccggtaagtgtggtgtgtgtccccttcaaaatacaaaacggtatccaccatatgttccagaatcttgggcccagcaattgcgccttccttagtgacatgcccgacgataaaaatcgtaatttggttggtcttagcaatccgcatcaattccgccgtcacttggcgcacttgcgaaacactcccaaccgcagccgtaatatcgggttcactcatcgtttgaatcgaatcaatcaccacgtattcgggacgcatcgtttcgatttgttggcgaatgctccccatatcagtttccggatagagatacaattgctcgccattgacgcctaatcggttagcgcgcatcttaatttgggacgcactttcttcacccgaaacatagaggattttaccttttttctcgagttgacccgagacttgcagtaataatgttgatttaccaatccctggatcgccaccgattaagattaaggaacccggcacgacaccgccacccaaaacccggtttaattcgtttaattccgttttaatccgtggttctttttgaatattaacgctactgatttgttctggttcggttgctcgaccggacatcgaaaaattagttttaacgctggccgctggttgttcacgttcttcgaccatttgattccacgcgccgcaattgggacaacgccccaaaaatcgaggcgaactataaccacaattttgacaaacaaactgcgttttaatttttgccatttagttcaccccaccttcattttaacatagtgcgcaatttgattttagactgtgttaacgccctgatgacccaaaaccgccagttcgtttcgtcgtcactgctttttcatcgtctgccgtcagataaggcataaagatgccttgcccaatgcgttcccctttacgaataatcacatcgcgaggactgcagttgaccaattgaatgaagatttcaccttcattggcgtcattcccgtaataatcggcatcaattatcccgacaccgttcggtaggatcaagccctttttcaacggattacttgagcgattggcaatcatcaaatattcatcatcttgcatgtaggccttgattcccgttggtactaagaaaggtttcaacgtttttgaagcccgttcaaaatcatcatcgaccaatggtttaccgttccgaatcatccggaataaacggacaaaattataatgccaaatggatggtaaaacaaaatcttccgaacaagcaaagtcatagcccgccgaatttgccgttgatcgaactggcaatgttaaatctgcttctgcgtatttcgtcacaatttcaaaaccacgttttttcatttaataaactcctaatttttagtcctttgacggtcctgtctatacctattaatcataccatgaaacgccagtccttgtgaataatccctaagaccgatttaataaaacttttaccttaaaaagccgaaattaaagcgctttttcagatagagttgcgtataatggagttaacgctaatagaagaggtgttttgatggataaaaatgcaatgaaaaaaatggcagcggaacgctccgttgactttgttgaagacaacatgattttaggtttaggcacgggttcaaccgtgaccttcatggtggaagccctcgctaaacgtgttaaagccgagaacctccatttaacttgtgtctgtacgtcgatcagaaccgcggaccaagctaaatcgctcggcattccagtgatggcactcaacgacgtcgatcacatcgatttaacaattgatggtgctgacgaagttgacgctaacttccaagggattaaaggcggcggtgcagctcatttattcgaaaaattagtcgcaacgacttcaacccgcaacatctggattgttgatcgcgaaaaagtcgtcgacaccatcggccaatttccattacccgtcgaagtgattccgtttggtagtcagcaagttttcgaccggttactgaaagaagggttaaaccctgaattccggacaaccgaggccggtcaacgcgtcttaaccgattcacagaactacgtgattgatttacatctcggtcaaatcaaccatccccacttattagccacttggttaagtgaacaagttggcgtcgtggaacatggtttgttcttagacactgttaatcaagttgtcgttggctcccctgagggcgttgaaattttaactgcccgttaatcaataaagtgtggccaaaacaactcgttttggtcacactttttattttattttgagctttagtttacttctcaattcaaatcaactagaattgagctatattacattaaggagtgattagatgacccaagaaattacacatcaaaatttaatcaagatgcaagcggacctcaagaacgtggcgcaatcaaacacgttgcgcaacgccgtcatgactaacggcattaacgccgtcagccaacgaccagaagccgccgtcacacttgatccaacctactcaatcgacttgccaaccggtgatgtcacgttccaaaaaaagagtggccgttgttggttattcgccacccttaatacactacgtcacgatttcgaacaaaaatataacgttaaaaacttcgaactctctcaaaattatctatcattctgggatcggattgaaaaagccaatctattctatgaaaagattctagcaactgcaacgaaaccattaacggatcgcgaagtcgcgttcaccttaaccggccccgatttcgatggcggccaatgggataacgccgttgccttgattcaaaaatacggtctagtgcctaagaccgccatgcccgaaacgtataacagcgaattaaccactgaatttaacagcacgttgaacttgaaattacggacagacgccattcaattgcgccaactcgtcgctgacggtgctgacgcggccacaattgcgcaaacgcgcacggcctttttaagcgaagtttaccggttatccgtctacgccttcggaacacccgtcgaaacatttgatttcgaataccgcgacgacgataaaagctaccatctcgaccaagctttaaccccaatgaccttctatcaaaaatacttcgaccgcaatttcgacgattatattaccgtcgtcagcagtccccaaagtagcaaacaataccaacaactctatagcctcgaatcccaaaacaccgttgtcgaaggccatccaatgcgcctattaaaccttgcccctaaccgcttgaaagaactcgcgattgaggccctccaaaacaaagaaaccatttggttcggtaacgacgtcctcgccgatttggaccgtcctaagggctggttagaccgcaacctctatgactattcaagtctcttcgatatcgatttgacgatgcctaaagaccaacgtttagactatcgccaaggtgtcgtgtcacacgctatgacgttaaccggcgttaacctcgtcgaaggccaacccactaaatggaaagtcgaaaacacttggagtgataaagtcggcaccaagggttacttctcaatgagcgatgcttggtttgacgattacgtttacgaagtcgttgttaagaaagcgtcattaacgactgaagaacaggccttattaaatcaaaacccagtcgcactagcaccatgggatgctttacaataaaggaggaattcaacaatggttcaatcaattacacctgaaaatatcaaacaattcaaagctgacttcaaagccgtaccacaatcaaacacgattaaaaacagcatcacaaacaacggctttctagcaagcagtcaaaatacagattccaaagcagcaatggatcccgttttctcaatcgatctaacaactggcgccgtcgctaaccaaaaacaatctggccgttgctggatgtttgccgccttaaatacgatgcgtcacagcttgcaagccgaattcaagattaaagatttcgaattgtcacaaaactacactaacttctgggataaattcgaaaagtcgaattatttctacgaaaacgtcttaaaaacggctgatctcccaatcggtgatcgtaaagttgatttcttaatgaccacgccccaacaagatggcggccaatgggatatgttatgcgccttgattgaaaaatacggcatcgtgcctaagtcagtcatgcccgaaacttataacagtgagaaatcgagcgaactcaatagtgtcttgaatttgaagctccgtaaagacgccgttgcccttcgtcaactcgtcgctgatggtgtcagtgctactgatattcaagttaagaaagatgcgatgttaacagaagtttaccggatgttaacttatgcattgggcgcggtcccaactgaatttgatttcgaataccgcgacgatgataagaactaccatatcgatcgcaacctgacaccgcaaacgttctacgaaaaatacgtcggttggcaattagcagattacgtttcaatcatcaattcaccaactgatgataaaccttacaaccacctttacaccgtcgaaatgctcggtaacgtcgttggtggtcgtgaagtccgtcatttaaacctcgacatcgacacgttcaaacaactcgccatcaaacaactccaagctggcgaatccgtttggttcggtagtgatgttggtcaatcttctgatcgtaaattagggattatggacactgaaatctatcaacaagcagaaatgctcgacatggacctttcaatcagtaaaggccaacgtttagattatggcgaaagcttgatgacacacgcgatggtcattactggtgtcgacctcgttgaaggccaacccactaaatggaaggttgaaaactcatggggcgataaagtcggcactaagggctatttcgtcatgagcgacagctggtttgatgaatttgtttaccaaatcgtcatcaacaaacgtttcttaccagaaaatcttcaaaaagttgaaactgacgaacaagacaaaccaaccgtccttgcaccttgggatccgatgggcgccttagcgagtcggtaattctaaatgaattaaaaatgacaacagccagaattaattggctgttgtcattttttgattctcgattactaaccgagtatttaatttaaacttctttaaacgtgactttagcaaaataaggcttaaataattcaggattaacaaagccggtttgcttctccatggtgtttaacatgccagtcgtcatccccgttttgagaatcacttcatccgattcattagtatcaatcgccatcgccaagccggctaacgttgaatcccccgaaccaaccggattttcaacgtgaatcttaggaatcgacacacggtagaaatggtcattgtgtttcgcaaaagccccagcggcgcccattgaaaccacaatccattcaacaccggcaaagattggtgcttgtaacgcagttttcaaaccgtcaatatcagtcacatcgatcggttgatctagtaactgcgcaatttcagtttcgttcggtttaattaacgttggtttgacggtcgcttttaaacttgctaacaacgaagcccctgacgtatctaaaatcgctttaacgcccgcattgccggccatttcaaccatcttagcgtaataatcagcccctaatcctttaggtaagctccccgacaaggtaaccgtactgactttggttaataattggccgtaaaattgcataaaagcttgtgcatcatccgctgaaattgttggccccgcttctagaatttcggtttggcaaccatcatcatgtaagatggcaatcgcattgcgtgattcttgttgaatttcaaaaaattcatgttgaatttgatcatcgtccaatttttgcttaataaaattgccaatgtggccgccgacgatgcccgttgctaataggggttgttgcattaaatgcaacactcttgaaacgtttaatcctttaccacccgctgttttactcacgtcgctaacccgatttacatcatcaatcactagcgtttgcagtggatatgaaatatcgacagctggatttaaagtgaccgttaaaatcataatgatacgctccttcatttaaaaaagggccaaactccgtaaagttggccctttttaatttttttaattagtcagtaactttgctgtaccaaggtgttgcagttttatacaagacttcgtttaaagcatcgatattgctcttgccttgtgtttgtaaccattgacgaccagctttgtcaccttcagctgcgaatggtttaacaccgttcttccaagtggcacggccacataatacaccgttaaaggttgaaccagcttctttagcaaatactaaagtttgttggaataattcagcagtcacaccagcacttaagaagataaatggtaagtcagttgcttctgattgtgtcttgaagtaagcagcggcttcagccttcgtgtaaaccacttcgccatcagcaaagccttctacatatttcatgttaacagggacttccatctttaaaacatcaacatggtattgttcctttgagaattctttcatcatatcgatgactttatgtggtttaaccttagcgtattcagcgctgttggcatcggcattcttagcgtcataagaaactaattctaagaagaatggaatatcttcggcaacacattcgctacctagacgttcgatgaagacatgtttcaaatggttgatatggacatcttcatcaatatcataataaagtaagaatttaacggcatcggcacccttttcctttaagcgacgaactgaccagtcttccaaaacgtcaggtaaacgaccaggtgttgttgcgtcataacccgtcttttcataagctaataataaaccggcgtccttatcacgagcagctgctgctggtaaaccatattctggatccaataggattgatgacgcatatttggttaattcttcagaaacggttactttgaagttgacaatttcttcttctggatcgcctttaacatcactggcaatcattttcttcaatgaaccacgttggtcaattgctaaggcactgatcacgccgtcctttgttgataatcgtttcaaggcttcttttttagcaggtgttagttttagcatattgtaaatctcccttttttataattatttttgataacgagaaacgccatctaggtaagtttcttcgagatttaaatcatgatcaaagacgataaaatcggcatcgtgagttggtgtaatgctcccacattgattatcgatatcaacactttgcgcaggcacttgactcgccattttgatggcttctgcaggtgtagcgatattccaatcaaccacgtgtttaacggcttgtttcaacatcaagacactgccggctaaactacccgattctaggcgagcagcgccatctttaacgatgactggaaattcgcctaacattgatggtccttctggcatcgcaccagcacgcatacaatcggtaattaaagcggtttggtcagcaccacgaacgctaatcaacgcttgtgctgcttgtggatgaacatgatgaccatcacaaattaattctgcaaaaacatctttaagggtcatcgctgcaccgaccatgccgggttcacgatgatttaaaggactcatcccattgtatgtgtgaacaaagattgaggcgccggcttcaacaacggcctttgcttcttcataagtcgcactactatgggctaaggcgactttaacaccttgttgcttcaaggcggctgtaaattctttggcaccatgccgttcaggtgcaattgcaattttcttaataatcccatgggctaattcttgccaatggttaaaaatctctaaacttggatcagagaaatacttaggattttgagcacccttatgttcttctgtaaagaatgggccttcgaagaataccccttgaatcttagcgccggtcacttcatcgtgatggtcaccgattgcttcaatgacttcattcaaagtttcgggtgcggccgttaaagtggttggtaagaatgacgtgacaccacattctaacaagccttctgacatggctttgacaccgtcaaaatcattgtccatcacatcgtggcctttcaacccgtgaatatgggtatcaacaagtccgggtgcaatccattttccactgtaatctttaatctcaccaactggcttttctgtttgatactcaccaaatttaccatcaacgattgctaagtagccaccgttttcaacgctattctttaaaaagaatttatctgcatgaatataatatgttgccaatttaaagcctccaagtttattgtatttaattttaattatttgtattcgtgaagcgtaacacctttaaccacgcggttaacagttccgcttggtgatggggtatctggtgtattgcccactttgattgaactcaataatgaaacggtttgcgcaaacatgacgtcggcgagggctaaatagccttcaggcagatgacgacaaccattttcaaaatcgaagcgatcccctgagaagttcaattcgcctggcacaccaacggctaatgttttagctgcgatttggtcgccgtgaatttcttctagaatgtcaacgtcgtattgacgcgtgtaaggttggttattaacaaagacgaaaaccagtgttttgtcattaacaaatgatttaggaccatgccggaagcccattgatgaatcaaacatggtcgtcaatttaccagccgttaattccaagacctttaattgtgcctcacgcgttaatcctgataggctgcctgaaccaagatagacaatccggtcgaaatctaaatcaattactgcttgaatttcggcttcacgagcaattacttcatggcccatggcaacgattttatcaacaaagccggcttttttagccgtatcagttgtatcaaagactaacatggccgttaatgacatgcagctgtatgaaccagtcatcgcgaaaccttgatcattagccaaagctggcatcatgagtaataaattacggtcgtcttctttagcagcgattgcaagtttgccatcaggtgcacacgtaatcgtcatttcatataaatcttgaaccacttgtttcgcaatttcgaccgttgcaacgctttcaggactattcccactacgtgcaaacgataccaaaatagtggtcacttcaggttttaagaagtcgtatggtgcggagacaatatccgttgttggaatactttcaaattggtaacgacttgcatcccctgattggtttaaataagggacgatcgtatcgccaacgtaagccgatgtcccggcgccggtaaaaatcacacgaatcttatcagccgttttaggtttaatttgatccaagaaagtcttaatttcagcttcttgatttttaaagttagctaatgcttcttgccataattcaggttgttgtttaatttcacgggttgtaatgctagcgcccatttcagttaatgcggtttcatttttgtcaaacatcttatatttccccttctcaattgaattagcgttggtgacgtagatgataggtaaacttatcgcctctggcaacactgagtgtatattcaataatttcatttttattattataagtggttcgttttaatttcaagaccggtgcgccttcatagaagctcagtagacgtgcatcattcgccgtcataatcccgactgacaaaacttcatcagccactttaaccacctgattgtaatctttcctaaagacatcgtacatcggtgctttttggagcgcttcggcgtctaacgttggaaacttactcaatggtagataagtccgttccaacatcatcggttcatcgtcagctaaccgtaatcgtttaattttaatgatttcggtgtcgacatcgattcctaaaccttcagcaacaaattggttggccttcattgttttaaaacttagaattttagtttcgggtactttgccaagtgacttcatctgttcggtaaaactatacgtcccacccagatctgtttggcccttgaccacgtttgatacgaaagtccccttaccgtgttgccgatggacataacccatcaactctaattcgttcaaagcaattctgaccgtcgttcggctcaagtcgtattggctggataactcccgttcggaaggcaaccgatcattgacttgcatttcattttcaattttaacttttaaaatatcgactaattggttatacaatggtcgaccatcatttgctgcgttcaattaaaatacctcctttaaactggtatcaaccacaactcctaatttaaaccatattagcgttaaagtcaattgaaatcggtcacattttaaggagtatagcaaaattggtagataccatggcgttaaatggcttattttaaaagatgcgcaattgcgtgtgctaaaccgtcttcatcgttactcaacgtcacataatccgcgatagctttaatatggggcatcccgttagccatcacaatcccgttaccgacatatttcaacatttcaaaatcattttcgctatcgccaacggccgccatttcactcgcttgaatcccgagttgttcacctaaataacgtaacccatctgctttactggtattctcaacggtcaattctaaacacatatcatctggtttgaccgcttcaactgctaacgcctcagtttgttcaattaattgcgttaagatggccggatttttagtacaatacaacatcttagaaatgtgatcgatatccgaccccatttcggagagatcatgaatgtaattcaattccaaactcttgataaatagactcattaaagattcatctcgaatgaggacgtaagaattcttaatcgtactgaaataaatattaacctgatctgaatcaccattggcaacaatctcatgcaccaatccagtgggcatttcggtgaccattaacggttctggattttgccatttaaaaacagccgaaccattcaacggcacgatgtacgctgattgaacgccaattgtttctaaaaaatcactggctgaatagacactacggccagttgcaatcactaattgcgcacccgtttcggtaattttacgtaaataggttttatttttttcagaaattgtcccttgagaattcaaggtcgtgccatctaaatcaattgctaataatttaggaaccatcttttcaccccattagattaaatcggcgctgtcgcctttttatagttatcttgattatcagtttcgatatacaccggttctgatagtaacgaaatttggtctggtaacgcttgttcagtttcaaaaatcacaatctgattatcggttgcttttaataatggtgctggtaaatacagataaccaatcgggccttgatgccaataccggccgagattaaagccgttgacaaagatattacctttacccaatgagcgaatatcgatgaacgtgtcaccgacgccctctaaatcaagcgtatactgtccaaatctaactggattatcagctgactgtggcgtttgtttaaaatcaagtgcctgcaaattatccaacggtagcgaatagatttcccattctgattcaaaatgtaaatcaataattaatccgcgacccagaccttttctctgagcaccgctttgtaaacgactcccataattgacccggcccatattttcaatgagcacatcaatctgattgatgcccgcttcaagatcgagtgtaaattcagcttccaagctttcttgatagagcgtcttgactaaaaccccgttaacaaaaacttgggcccggtcatgcgcttctaccaacaacgctttttgctgtttctgagttgatttgacctgcgtccggtacaaaatgtacccgtagaattgatcaaaggtttccatcgtttgtggttgttgcgttttttgcacttggctaatctgagcgagactatcaaataaagtttgttcacaaacctatgcaattgaccactcgtcttgggtagtgtggttggcaacgccgtctcattataatcggctaaaatcgcttgcgcgagataatatttaggtgtcggatcaccacattcagtcaacaaggcatcgtaatcatacgacgtcacctgtggtaaccgtttcaagccccgcgtggaacagccattcatgaagccgaaattagtgccaccatggaacatgtagaagtttaccgacccgcgactaaccattgcgcgcagtgtttcggcaaattccaccggatcgcggcgaataatcggttcattgtagcggttaaaccagccatcccagaattccatacacattaatggcatttgaacccctttttgatcaaagaacgtttgcatttggtcaaaattccaatccggttttgaaccaaaattaccggtagctaaaatcccatcttcaaccaaactgccggcttctaacgtgtcatcccaactgccatctgacgtgaataatgggacggtaatcccagcatcacgaatcagtttgaccagtgtccgcagatacgttttatcattaccgtatgacccgtattcgttttcgacttgcatcatcaagatgttgccaccttcagtgatttgaaaacggcttaaccggggtaagattgcttggtagaaatgttggaccttttcgataaataacgggtcgctcgttcgatagttcattccaggatacttcaatagccagcctggcagcccaccaaattcccattcagcacagataaatggtgacggccgaacaatcacgtacaagtctaatgattgtgcaatttcaatgaaatgttcaaaatcgttagtggcgttaaaatcccactgattctcaacgggttcataaatattccaaggaatataggtttctaccgtgttacaacccatcgccttcagattgcgcaatgaatgttcccaatattcaggcaacacccggaaataatgaattgatccggaaataattttgaacggctgtccgtctaatttaaactctctctcaatctcaaactttgccatgtcaaacctcactcttcgttagttgttattgcttagggagcatgtcattcaatagtttgaccccagcagttgcatcattgattaaattcaagggttgacctgtcatttgagcgtttaaataactgatacacattggcatattcatccctgtatataaatcaatatcttcgcccttcataacatatttagaaatttggttagctggcgtcccgcccattaaatcggctaggacaatcaatttttcaccattagtttcagctttaatcgcttcaaacttcttaatgtaatccgcttcgccttcttcaggtaataaaggtaacgtataaatttctggttgttcaccgaaaatcaattccacactcttctttaattcttcacaaaaacgaccatgacttgttaatactaatttactcattatcaatacctcattcattattttaatttttaatacggaaagcccccccgctacaataatactttgtagtgagaggccttcgttgattgattaacctttaacaataaagcctactgctgaaagtgcgattgaaacgaataagacgatgaagattgcccgtgttgcggtcatgttcttcttgcctaacatccagtagattaaaccaacgatacatgcaggcactaacttaggtaagatcatatcaagcttgtcttgtaaaacaacgcttaaatcgcctaaatggaagacggtcccgattttgatgttaatcatcgttgcaactaacgccccaaccatgaagacccctaataaagtagcagcatccgttaatgcggataacttactctgcattctcgtgactaagttggccccttctttgtaagcaaagcccaattgactccaacggaaatacataaccccgatattgacagcgacccataagaggaccccagtaggattaccaacggtcgccatattagcggcaattgccccgaagatagctggaagtaaagcggcaaagattgaatccccgatagcggcgaatgaacccattaaaccaacttttaaaccggcaacggtttctaatcctttagccccttctttttcttgaatggctaaatcggtacccgtaataatcgtgttaaagaagttactggtattgaagaattgtgtttcagtcttcatcgacttcttcaaaccttctttatcatcaccataaatcttttgtaattgtggcaatattagatataaataactcgtattttgcattctttcgtagttccaacctaattggaatagaaagagactacgacggttaatttggttaaaatcttttttggttaatttataattagagttcgtcatcttcgatttctcccttcgcatcgatcactgtttcttgttgttcagctgagccatgttctgcaacaacctcatgtttctccatactgtgtttgtattcaattgcggcaaaaccaaagccgatcaatgcgatacctaacattggtaaaccagcgaagttatgtgcgaaaccttttgacaaaccggtaacggcagttccgacagcactcacatcaccgtaaattgtcgcgaatagcgcggttacaatgaaaccaatgattaaatatgggaagtgtttcttgactggtaaatatctgagtaagattgcaaacccaacggctggtaaaacggccccggctgtttcaagacctgttgctaaccaacttaattgtgagttcatgtaactaacgacggtattaaccaaaccaccaccgaacgtcaatgctaagaagacaggtaatgcacgtgataaagcccaaggaattgcaccatagaggtaatttctttcgatagctttataattttcagtttcaataaatctatcaattcgatgtgcaaagaacgtatttgcaaaacgtgctaagatatccgtttgaatcaataatgcggcaaccggtacggcgattgctgagatggcttggctttggttcatgcctaacccaactgaaaaggcagttgctaaaacagtccctgagttagcgtcaatccgtgaagaacccccgaatgtaccaacccctaaaacagttaattgcattgccccaccaatcattaaaccagttttcatatctcccataatgatccctgagataaaaccggcaaaaaccgctgaacctgcactcgagttaattgttaattcgtcacagatttgatatccagcgtataacgttaatagtaatatttgccaccattcgatacccataataattctcctttagtttttaatattgatatagcgtttacaattgcatgtagcctataactctttaattaatgacatgaaatcattcactttatcgccaggtaccatccgattagtaatcgaaacgcctttagctgaaatttgtttgaaaatatcaatatcgtgatcagtcacgttgattgatttgttaacgtgtttcgtttcatccgtttgtgacatattcccaacgttgatttcgggcagttcaacacccttttcaagtaattcaagtaacgtttctggctttttaacaaccaagaacaatttttgtgaatcataacgaccggccagaatatgttcggcagcagtatcaactgataacacgctcagctttgtgcctgcaggtgttgccatccgtaaaccagatttttcgattgcgttttccgaaactttattatcaacaaccataatccgtgaaacacctaaagatggtgtccaaagatttgcgacttgtccatgaaccaatcgtccatcaattcttacagctgtaattgccatataaaatcaccctccaaatataataattgccataaaatcggaggatatctcacgggatgaatattagtaaaccgattacaaagccttttatggcgcttttatcgatttttagattgtcctataccgatttttttgtttggtacgaaccaattacaaaaaagaagtcttcagccaactggttgcaaccatttttctatttgattcttgatgagacacactataccaacgctaaaaataaacatacctcctgggggaaatcatctccccctcaattggcatgtttattaatcactatttttattgaaataatttaaaaatggctgttttagtctgggccgccttcaattcagcgacgaactgctcatgcactaacagtttggaaacatccgataggtacttaagatgttcttgattatcttgatccggaataatgaacgaaattaacgtatcaattttgccaccgtctaaactgccccattcgattggttccgctaatttaacaataaacatccccgatttattgatggttgccgattgcgcgtgaggaatcgcaattccgtgttccatcccggttgaactttcagtttctctaaatagatatttcttttcaacttcttgttgatcactggcgtagcctttttcaaccaccattttcgctaggtattgaagtgcagcttcttttgaatcgactttaacccctaattcaatattttgttgatcaaaaatcgcctcaaacacatgtgcttttgccgtagtagtttcaactggttgatcaacagccattgattgtccgttattggtaactaataatgtttggtcttttttatattgtttttcagcaattaatgctaataaaacgcctgaaatcaaagcgcctatcacaatccaaacgacccaaagcatcggatggttgactagtggtagcacaataaaaccaccatgcggtgcggggacacttattttagtgatataagtcaacgtagcggcgactgcagaaccaatcataaatgctggaatatttaataatggatttttcgcagcaaacggaatggcgccttccgtaatatgggttgaacctaacaagaagttgacatagcccgcactacgttcttttgacgaataagcctttttattcattaaaacggcaaatccagtggctaatggtggtgcaatacaagcggccgaaacacctgccataaagaaatagttaccttgcgctaacagtgccgtcccggttaaataagcggccttattaatcggacccccaaaatcagatgcacacataattccgacaacaattcctaaaagaattgggcttgaattttccattcctttcaagaaattcatcatgccttcattaatattttgcattggtgttgataaataccacataattaatcctgagattagtacccctaagacaggaaataagaaaatagcttttagtccatctaatgatttaggtaacttcttaaatgctttttgcaacaagagcactgtatatcccgctaagaaaccacctaagatgccacctaaaaagccagtgccattagtcaacgcaatcattccggttgcaaatccaacaatcaatccagatcgtttagcaattgcttcggcaatataggcgcataaaaccggcaccattaagcccatcgttaaactaccaatactgttcagttgaaatgcaaactggttatattcagcacttttgggatccgctgaattaataccccagaaaaacgaaacagctagtaataccccaccagcaacgactaatggtagcatgtgtgaaacaccattcatgacataaacgtataattggtgccaaaacgaaccacccgaaatactggctgattctgctgatcccttttcgccagttccttgatagactggaatcgattgatcgttcaaaatttgattaaccaattgatcggcatctttcatccctttagtgaccgagacattaatcatctttttgccaacaaaacgttctggattaacgtccttatcagcggcaataataacgccgtccgcttcatcaatttcctgttgcgttagcgcatgttcgatgccgctttggccgtgagtttcgaccttgattgacaccccaattttcttagcagcctgttctaaagcctcctgtgccatatacgtatgggcaatgccggtcggacagccggtagctgcaataatttgatatttcgtcatcttattgatcctccaatgttatttctgtgactttaatttgctcttgtagcgttgcaacatctgtaaaatcagtcaatcctgctgaaaatgcggttgaactggctgctgcgatactatatttcagattttccgccaatggtttagcttgaaccatcccagctaaaaaggtgcccaacatcgtatcaccggagcaagctgtattaacaactttaccaacagctgcattaccttttaggacttgttcccgattgatgaaagctgcgccttttgcccctaaggataataagacgttttgtgcgccctgttcaactaatttttgggcgtactgaatcaattgtgtgtcacttaaggggcctattacgttgaaccattgcattaactcttcgtcatttggttttaataaaaatggttgatattgtaatgtctccatcacggcttggtaacttgtatcaatcaccaatttaaaaccaatctggttggatagtttggcaatatcaataatgatggattctggaataccatcggcaaaactcccagagaccactagcatatcatcccgttttaaacagccaatcaagttcaatagggcgtcaatttgctttgaatcaacatggggccctttgttaactaatttgtactcttcatcccgatcaaccacccgtgtgaaaacgttgattctagtgatccccgcacttttaataaattgtgtttcaattcctttttcatttaaagcgctttcaatataatcgtttgtaaagccgccgccaatcccaatcgctttatttgctactgctaacattttaagaataaatgagacattgacgccttttccgttaggttggatatcatagtcattcgttcgattaacaacttctttttttaaatgctctgtttctataaataaatcaatcgctgggtttaatgtacatgtataaatcatggtcattcctcctactctctacttctattataatcagttatttttgaaaatgttttcatataacggtagaatgaacctaattatgaaaatattggtacattttgaggaggcattaattcgtggtcaaagcaacgctcagttcatccgaagactatctctggacttacattcagcaacatattgatgatattgccaatatgtcgattattaaattaagtgaacaagctaacgtttcaacagcaaccattgtccgaacgatgaaaaagaaaggctacaatggtttcacgtcatttaaacagcaactcattcaaaaaaataaggataatactcaatttgcctttttgaatcaagtcgatcaagaaatcaaatccgccgttttaaaaaatcaacatgaagtcaataatactttagaaaatttggatatcggcattgttgaagattccattcaaaagattaaagatgcccataaagtttatatttttgcgcgtggtttctcagaatttattgccaaagaaatgaccttaaaactccaattacttggcaaaaattgcgaaattcacgatgatcccaacattatcaagccaattagtaaacaaattatgaaccatgacgtattaattttaattacgttaaatggtgaaacagctgaacttgttcaagctgctaaaaatgcgatgcaaaacaatgtgaccatcattacttttacaaccaatccgaacggtactattttacagttttcagatttagtttttctgggttacaaatcgccaatctcctattttcccgactacgaagtccattctcgtctgccattaaatatattagtccgaatattgttggatgcgtacgccattcgtagtccacacctcttgtcctaaatattttaaatatagatacaaaaaaagtagtgtggctagacaacctcactacttttttgtatttatttatctgttttagcattcaacgcaatcaatgcatcgtaataaatttgcatcatcatttgccaatcgctgaacttcaaccattcattacctttatgggcgatgcctttttggccggggaaggatgggccaaatgcgatgatattcggtagtgcacgcgcataggtcacaccagtggtcgttactggtgtcccgtctaaaccggtgtcggcttcatagattgcccccaattgttgaatgaagggcagttctggattggtaacttgcgacggataacgccgtttgacggtcaccgtcatcgttggcaacaacttggtttgaatttgcgttaataacgcatcttccgtcgtcgaaattggatagcgacacgttaaatgacaactcatactttgattttccaaactcagcccataaaaagcgacttgcaacgcacctgaagccgtatcttgaaaatcgattcccagattccggcccgttgtttgcgtcccaatggtagtcgtcacccaatcgaaaaactgaccaacttgtccggtcaactgactgccatcagcggctaatggtggtaagacattttcggcaagttccggcgcattactaggcgctttgcgacctgtatagtgtttaacggtaccgtcagccagtattaggctcgcatggtcaggaatgaagcttttatcaaaatggccatccaacgccttaatctgtcggcctgagccatcagttactggcagtgttaactgaatatccaacaacccgcgttcgccatacaccgccggaaatttacaatccggcgtaaaacccgcaatgggtgctttttcatgttgtaaatacaacggaatatcccgactacctgattcttcatccgtgccaaagataatccgcacccgttgttgaaattcaatattttgaattttgatcaggtatagggcaaataaagtcgccattaagggacccttattgtccaagacaccacgaccgtataaataattatcgacccgcgttaaatcaaacggcgcatactgccagtcgtcttccacgtcgacaacatctagatggcctaatattccaaaataatcgctttgttggtcttccgttggcccatattcaacccaaccgacacaatcggcgacttgtcccgttcgaaagcccatttctttactgatttgtaaaaccgtttctaacgcccgtttaggcccaaccccgaaaggtgcgccaaacgttttcgggccagcgacactcggttctcgtaaaacccgtcttaaattagctaaaaaatcgacttcatactgactaaataatgtttgaaaatcggtccgaatttttttcaatggaataacttctttctaattttaaacttcatcaaaattgatatcaacatccgctaactgagcggcttccgtttcttctgctaggtattggcgatccatcattttaataaatggatagtagatcaggacgcctaaaatcaattcgaagagttgcaacaccgaacccgtccaactccccgttgatagccagccggaaataatcggtggcgtcgtccacggcaacataaccccattggtgtatggcaccaatccgatgctaaatactagtcctgagattaacgtgttcagcaccggtacgatgataaacggaatcgcaataatgggatttagtaccactggcaacccaaaaataatgggttcattgatgccaaaaatcccaggcacgattgccaatttgcctaactctttgacccgtttagatttacaaaccgtcaacatgacaatcaatagcgataaagtactgcccccgccaccgtacgttgtaaaaatatcaataaactgttgcgtataaatatgaggcaatggtaaatgattttgaaaggcggttaaattatcctgtgttaaaacaaagaagatgggtgaccaaacgctattggtaatcgttggaccattaatcccgaaacaccatagtaacatcgcgatgaaattatacagcagtactgaaggtaacgaattaccagcgccttttagcggtgcttgtaacatcgtgtagataaaattataagccgtttcgaaactggataagctaaagccaatccggattaagaagaaaactaaaacaactaacccactaggtaatagcgcatcaaaagattcactaacagcgggtggcaccccttctggcattttgattcgccagttacgattgattgcaaatcgataaatttcaacactgactaacgcgatgaatatccctaagaaaattccattagggcctaaatacatcgtttgaacagccccaatcgattgtttaccaacggtcacaacggttggcgtcaaaatcagaaacgaaataatggcaacggcactcgaatggattgcttgtaatccgcgattcttaccataggcgtaagaaatcccaaaacacgctaataagcccgtaaaactaaagaccgaattcgatacggcgctaaaccattccgtccaatccggacccaagatatgactccaaaattcagcccaacccggaattggaaaattcccaatcaatagaaaaatcgacgtgacaataatcaacggtgtaatgattaaaaagccatctcgtaatgaccgtaagacaacgttatttcctagtttaatcgcaaacggcattaatatctgttctaatttcttttgcattgattgcggcctcctctttaataacagtattgttgtgcgaattcagtaatatcagcctgttcaacttttaattgacaaagttcaattgttcgatcgattgaatccgatagtccggtcccaccttttttcggcattttaacgatggtcaataacttttgataatcctcaattatctataataacttcttaatttcttttaaaaccccataattatcattcgtatcagcttgatacgtcgcgtattgcgccatttcaggcgccgcattgcccattagataactatatttcacggtttggagcatttccttatcattataagtatccccaaacgccatcatttcggtgggtaaaatctggaaatgctcagccaataaatgcatggcatggcccttattgacgccttgattcataatatcaacccattcgacgcccgcgaccgtcaccgaataatcactgccaaattctggaccataaacctgttcatagaaggcctggctattcttttcggggaagtagacggtaaatttatccgcttcaaccgtgacttgggtcaaatcatcaacgtattcaatattggcataaaattgacggaagatggcatctgaatcttgatattgccgttcgatataagcagcgtccatcccacaaatcatcccgattccggtctgactttcattcacaaattgaaccattcgttgataatcatttaagggtaataaactcttaaacaggatttcgcctcgatagctgatgacgcccccgttatccccgacataacacatttggtcggctaatgtcggaaacatttgtttcagcgtatacaacgggcgaccactggcggcggtgaacaagataccactttcggtcaacgcatgaaccgtttcgacaaaatcgggtggtagctgcccttgttccgttaataaagtatgatccatatcggatgcgattaatttaattgccatttagtaaactccttctcaataattacttctaataatataacgtttaaatccaattctagcaaccgattacattgattttgaaacaaaaaaagagactaacaccccttatatgtaggcgttagtctcttttaatactgtctttattttaacgtcaaccgtttcaaacgtaatgcatttaataacaccgaaactgaactaaaactcatcgctaccccggcaatcatcgggtttaataaaggccctccgaatagatgtaagacccccatcgcaactggaatccccaaaacgttatacgcaaaggcccaaaagaggttttctttgatattacgcatcgttttgcgactcaacgtcaaagctcgtggcacgtcttgtaaatcgctatgcatcagtacgatatcggccgattcaatcgccacatcggtgccagaaccaatcgcaatcccgatatcagcttgcgctaacgcgggcgcatcgttgatgccgtcgccgaccatcgccacgatttgaccggcttcttgtaaagcttgcaccttttgtgctttttgttctggtaaaacgtcgctaatgacttcagtaatcccaacggatgccgcaatcgcttgcgccgtttgcgcgttatcgcccgtcaacatcacgacttgaaccccttgttgttgtaatgcttgaatcgcggtggcactcgtttctttcactggatccgcaaccgcgaccaccccttggagttggcccgccttagcgagatacatgggtgttttaccttgcgccgctaattgctgaacggtggtctgttgctcagccgtcaccgacacattttgttgttgcatcaatcccagattaccaaaagcaaccgttgcttcagccacttcggctaataacccaaagccgggaacggccgtaaattgactaatcggtaataaagctaaatcctgatccgttgccgcctgttttaaggcactcgccaacggatgctccgaaccgacttccacactagccgccagttgtaataattcggtggtagtcccttgaaccaccaccgtatcggtcacttggggttggccttgcgtaatcgtcccagttttatctaaaacgaccgtttgaacccgttgtgcggtttcgagcgccgtcccacttttgattagaatgccgttttcggcccctttaccggttccgaccataatcgctgtcggcgtcgctaacccgagcgcacacggacaggcaatcactaagaccgaaatcgtaatcgttaaggcaaataaccatgattcttggcccaagaaataccaagctaagccggaaaaggccgctagccccatcacaattggtacgaaaacgccggcaatcgtatcggctaattttgcaatcggcgcctttgaaccttgagccgattcaaccaatttaacgatttgagccaaagccgttgcctcaccgactttagtggctttaaattggaaactaccattcttattgagactggccccaatcaccgcatcgccgacttgtttttcaaccggtaaactttcgccggtaatcaacgcttcatcaatcgcggaatggccgctaatcacttgcccgtcaaccggaattttttcacccggtttaaccagaatcacgtcgcccacttttaaatcggcgaccgccacggtttgttcaacaccatcaattaagaccgtcgcttgcttcggcgctaaattcatcaaccgttcaatcgccgccgatgttttgcctttcgaacgcgcttcaaaatatttacccagcgtgatcaaggtcaaaataacactggctgattcataataaaggctcatcgttagtgcggtttgcccaaacaaaataccaatcgtcgcaaccaaactataaccccaagccgcactcgtcccgagcgccactaacgtatccatattcggatgacctttgaataacgctttaaagccaattgtgaaaaatgaccggccccaatataacaccggtaatgtcagtagcagttgcgtccccgcgaacatcaacggatggctagtcgggtgccagagacttggtaacggcgcaccaaccatatgccccattgataaatacagtagtggaatcgtcatcaacgcggaccaccagaagcggtgccagagcacttgcaaatgagtcgcccgtttatcctgaatcttagccgctgtttgttgatgatcgacttgttcagtggcttgataaccggcatcactaacggccgtttcaatttcagccacagccaattgttgactatcgtaatcgacctgcattttctcagtcgctaggttgacggccgcagtacggacgcctggtaatttgcgggtcgtgccttcaatcgtttgcgcgcaagaggcacaaaccatcccgtcgatattaaaagttttggtggtcatcgctgactcctttctcgcctaattactaagcaatcgtgtatttcgtatcttgcaatgcggccgctaacgtcgttgaggcgactggttcagtaaccgtcaacgtcgcttgcttttgggctaaatccatttggacggattgaacccccgctaatttttcaaaccgatcttgcaccttttgcgtacaacccgtacatttcatcccatcaatcttaacaatttgttccatgattaaagcctcctattatttacatttgtaaactttatctttaaaaaaatagccgttgcgaacaactgctttctttcgatacattaaatttacatctgtaaacataaaaagtcaagccttaaatctcataagtgttcacggactgagttaatcgatcggcgtgctaaactaatgactagcaaaggaagtcctcacaatgattgattacaccgcactctaccatcaactattagcccaacatggtccgcaacattggtggcctgccgattcagtttgggaaatgatgattggcgccattctcgttcaaaatacaaattggcgcaatgtcgattattcgctggccaatttaaagcgcgccactgatttacagcccgctcgcattctggcgttaagcgctgaccaactgatgacgttaatccggcccagcggcttttatcgacataaaagtcaggcgctggttgccctcctcaatttcttcaaaacgcacgattatcagattagccaaatggacgcgacttattcaacgcttgaattacggaccttattattagcccttcccggcgtcggccccgaaaccgctgatgtgttattattatacgtcttcaaccggccagtctttgttgccgacacttacgcccgccgactggtgtcccactacgaacaacggccacttaaaaatttaacttacgccggggtcaagaagcaactcgaggcgactctaaccactttgaccgttcaagacttccaagaatttcacgcactaattgatgaatttggttcagaattacttgaaaccaatcaaaaaggcagctaatcaggtcctaacgtacagggcgtgactggttgccaagctgattcatgagtctttaaatagattggcccttaatcgaggggctatttggctgattaaaccacatttaatcaattcgatgagcacgtatgggacaaaaccggtcatcaacgctaccggccacgttaattttaaaaagaacaataaccagaccgtcccaattaataattggctgatgctggccacaaaagtcaccccgaatagcgttaatggcttgcggcctaaccaagcaataccaatggtcgtcacggtactatacgccaaaaatccgatcagatagccaccggtcggcccgaccaacacactcatcccgttcgtaaaattggcaaagattggtaagccgagcaaccctaacgttaggtaggctaaaataatcatgagatttaaacgatacggtaaaatcgtcgctaataagccaacgactaacgtttggagcgtcaccgcaatcgtccaaattggtaagctaatttgggcactaatgattaataacgctaagcccaaacttgcataactgatttgacgcgccttggataaagtcattttttcactcctcgcaaaccactagggctatttttaaataatcgcttgttgaggaaactatcttaaagggttgaatcgttaataattgctgtcattcgctaaattaaatgaacgcctttgtcgacataaatcacatcacccgtaatgccactggctaacggactcaataagaaactggcggtattgccgacttcttcaatcgtgactgattggccatcaaccgtccggcgttctgattcgtccaacaaggcccggtaatctttgaccccagtgacggctaacgttttaatcgcgccagcggaaattgcgttaactcgaatattttcagcccctaaatcacgcgctaaataacggacactcgcttccagtgaggctttggcaatccccatcacattataattcggaatcgcccgttctgaaccaaaataagttaatgtcacaatgctacccggttgttttaaaattagacgaccatattttgcaactgcgattaatgaataagcgctgatttcttgagccaataagtaaccctcgcgcgatgtttcataaacaacgccttctaattcttcgcggtttgcaaaagcaattgcgtgaacaataccatcaatcatgccaatctcggctttaatcgtttgaaaagctgtttcaatcgcttggtcatcactgacatcacacgctactaaagtcgcttcagctggtaatattttaagtaatttttgcttaatccgttcattttgataagtgtaaatcacgtcgccaccagcggcgataatcgcttgtgcgcatccccaagcgatacttcttttattcgcaacacccatcactaatattttttgaccttttaacactttgcgtcacttcctcttccttaaaattggcggaatcgcgcttgacgcatcttcaagagcgtctcacttggaatcgcctgtaaattagttaattgttcactcaaaacactttgaatcgcttggcagaattcagctggattgtccgattccggaataatcccctcaatgatccccgccttcttcaatgcggtcggcgttagttgcatgatttcagcggcttgatccgccaatgaactgtctttccacaaaatagaagcaaaactttccggtgataacaccgaatacatactattagtgaccatccaaacttgatcgccacacgccaacgccaatgcgccaccagaaccgccttccccgaaaatcaaactgataattggggtttttagcgtgctcattgtatagaggttattggcaatcgccatcccctgacccgtttcttcagcgtgagcgcctgggtaggcccccgctgtattgactagcgtaataatcggccggttaaatttctcggcggcctgcattaagcgcaaagccttccgataaccagccggttcgggacagccaaaatgacgcgcgatgcgctcttccggtgtggtgcctttgtccgtcgcaatcacagtcacgggctggccttgaaaagtcgccacgccaccaataattgcggggtcttcgccgccaacccggtcgccatgaaaaaccagcaaatcgtcaaataagccggttaataattgttccgtggtgattttttgcggactacgggcccccgccacgatttcggcggcttgggttttagttgatttcattcgttagccccgctttcatgtaatctgagaatttgactcaagaccgccttttgttgttcgcgtggaacgatttgatcgatgaacccattttgcagtacggtttcggcatcctgtaaatcagccggaatttgttcgtgcgtcgtttgttcaatcacgcggcgcccggcaaatccaatcaacgctttaggttccgctagaataatatcagcctgcgtggcaaaactagccgtcacaccccccgtggtcggatcagtcaataaactgatgtacaacagcccttgttcggcatggcgtttaatcgcagctgaggtcttcgccatctgcatcagcgatagaatcccttcttgcatccgcgcgccaccagaggcggtgatcagcagcactggtaacttttgaatcgttgctaattcaaataatcgagtaatcttttcaccggcaatcgtgcccaaactacccatgataaaatacggatccataatcccaagcgccacccggtgaccgtcaatcatggcgatgcccgttaggacgctgtcatttaattcggtaatttgttgggcttgtttgactttttgcggatattttgggaattttaatggattaatggttttaagcgtcgtatcgagcggttgaaaatcggccgctagccacgctaaccgcgttttagcccgcgtgcggaaaccatatccacataacggacagactcggtacagcccaatttctttatggtaaaaagattgctgacatttaggacaagcaatccataaaccatcaggcacctttttgcgactcgcttgattatatttcaggtgcgctttgccaatctgacgcacggcattaaataattgcatgacaccctcctacgttaatccgttaatttctgtgataaataatcggttgtcacctgactggcttcaaatgtcggatcaatcaacaatgtttgttggaaagcttggttcgttttaatcccggttacaatcagttcgtttaataaccgttgcattttcgcaatcgcaatcgcccgcgttggcccccaagtgattaacttgccgatcatcgcatcgtaaaaaggcgaaatcgtataaccactaaaaagatggctatcaattcgcaccccaagattgccaattggtaaatagagataatcaatcgtccctgctgaaggcgcaaaatgttgttctggattttcggcattcaaccggcattcaatggcaaaaccattgggcgttaactggctttgttcaaacgacaagggatgcccctgtgcgacattaatctgttcgcgaattaaatcaatcccggtcaccatttcagtaatcggatgttcgacttgaatccgcgtattcatctctagaaaataaaattgatgggcttgatccattaaaaattcaacggtacccgtgttgacataattaatttgctcggcggcttgcaaggcgatggcaccgagtttttggcgttcttcagtcgttaataaagtactgggcgtttcttccaataccttttgtttaaagcgttgcaatgaacaatcccgttctggaaaatagacgccgtgcccctgttgatctctaaaaatttggacttcaatatgtttaacgttggtcataattttttctagatagagcgcttgattgccaaacgctgcggcactttcagcttgcgcttgcggatacagttgattcaattgtgcttcggattcaacacgtcgaatccctttgccacccccaccggcgacggcttttaacaagactggataaccaatgtcttgtgccaccgcttgggcttgcgctaaatcttgcactggaccgtcactgccgggaatcaacggcacaacggcttgttgcatgcttaacttggcttgactcttatcgcccatcaaagcgatcacttgactgctaggtccgatgaacgtgatgccacacgcttcacacatttctgcgaattgactattctcggataaaaaaccgtagccgggatgaatcgcatcacagccggttcctaaagccgcggacatgacgttttgcatattcaaataggaatcttgcgcacgattgcccccgatacaaacggcttcatcggctaactgcacatgtaaactattgcgatcagcctgcgaataaaccgcgactgacgcaatctgcatttcttttaacgttcgaacaatgtggagggcaatttcgccacgattggcaaccaatacttttttaaacatctggtgccctccttattcgatgatgaatgttaattctgcggtacaggctttttgaccatcaacggtcgcaatcgctttacctaacccaattttatcttttaatttttctaaagtaactgtgatttctaaaacatcccctggtcgcacaacgcgccggaacttggcgctcttaatgccaccaaagtagaccgtccgccctttaaattgatccaaagtcaataacgcaatcgcgccggtttgcgccatcgattctaaaatcatgacccccggtaacacaggattacccgggaaatggccttggaaaacggcttcgttaatcgtcacgtttttttgcgccacggctgattcacccggtacatgcgttaagacccgatcgattaacaacatcggatagcggtgcggtaatatcttttgaatttcgacaatatctaacatgttttatccttctttcacttcgaaaaggggttgatgatattcaaccagttcttcattggcgaccaagacggccgtcacaacacctgcgaccgtacttttaacttcggtcatcatcttcatggcttcaatcacgcaaaccacctcgccaacggtcactgattgaccgacagtcaggtaagctgattgatcgggggccggttgcaaataaacactgccgaccatcggtgattcaatcgtcgttcctgattcactaaccgttggttgatgagtcgacgttgcttcctcaattggcaaatcaggtgtagcctcaaccggcgtcctcattgtggtgactgctgacgttggttgtttatttaaatataatttaacgtcttctgtttcaagttgcatttcttggttggccgattgattaaataaggtcaccatttctttgacttgttcgtattccatctttagtcactccacttcttaaacagcaacaccgcattgtgaccaccaaaaccaaatgaattactcatcccgtattgggcgtcaggggcactcgttggcgccgtaatcagattgatctgacaatgctcatcgagttgttgcgtcccgatattcggtggtaaaacaccttgttgtaaagccgctaacgtaatgacggcttcaaccgcgccggccgcacctaataaatgacccgtcatacttttagtactgctgactggtacttggctgtctaaaccaaagacccgattgagcgcggccgattcagccaattcattggccatcgtccccgtaccatgggcgttgacgtaatcaacttggttgggtgtaatctggccttcattgagggccatctgcatcgctttagccgcaacgctcccgtccggattcggtgacgtcatatggtaagcatcacaattcgtgccgtaaccaacaatttcacctaaaatagtcgcattgcgggcttgcgcgtgttctaaactttctaacacgagcgtcgcaccaccttcgcccatcacaaaaccttgacgattttgatcaaatggcaaagaagcgcgctgcggatcggtcgccgttgacaacgttgataacgccgcgaaaccaccaatcccgatttcattaatcgatgcttcggccccgcccgttaccatgacagtcgcgcgcttttctttaatctggcgataggcttcaccaatggcgttggccccactagagcaagccgtgacaattgtcgtacaaatattttgcgcgttgatttcaagggcaatattagccgatgccatattgccgattgattttggcacaaataacggtgaaatatgatcagcgcctttttcgaccattcgcatcacttgttcttgaatcgtggttaacccaccaatcccagagccatagatcacacccaaatcttcagaattcgtattctctggtgtaatctgcgcctgttgcatcgctgctagcgcactgtcgactgcgtattgtgaaaataaatccatccgcttcgcttttttcttgccaacccgagcagccacatcaaaatcttgaacctcagcggctaaggtcaccccagtcgcactggcatcaaatttagtgatcggaccgatgcccaaatcaccttgtagaattcgtttggtaaaagtggcggtatcgttgcctaaaggtgcgacaacgcccataccggttacaactactcttgtcattgttatccctcacttatatcgtcatgccaccatcaactgttaagacttgaccggtgacgtattgattttcagccaagaaaagcgctgctgatgcgacttcttctggttcaccaaaccgatttaacggaatttgtgccaaaatggcatccgtcatcgctggttttaagacggctgtcatatcggtcgcaatcatgcctggggcaatcgcattacaccggacatgtcgtttagcgccttctttagcaactgatttcgtcaaaccaataatccccgctttactagcggcatagttggcctgaccagcattgccatgttgaccaatcacactagctaaattaataatgcaaccactgcgttggcgtaacatcttcgtaaagacgacttgggtgacattaaacgtccccatcaaattaacatccacaaccgccttaaaatcggctgcggacatcgccatcaataatttatctttggtaatcccggcattattgaccacaacgtccaatcgttcaaaccgttcgaatgcggtcgctacgatttgggtcgccgtcgtttcatctgtgacatcgccttgcacaaagacgcattggcggccaatggtttcaatttcggcgaccagttcaggatcgactgtctggcgaccattgagaattaaatcatagccggccttagcaaaggtcaccgcaatcgcgcgaccaattccgcgactactgccggtgatggccacgactttagcttcgtttttcattagtgcacctctttcaacgccgctaacacggacgtcaattgtttttgattaccaatattaaagcgttcaactgtcggaatcgtttgccgggcaaatttacttaacgtcttccccggaccgacttcaattaagacatcaattccctgttgggctaaaaactgtagattagcgctaaaatgggtcgcatgggccatctgttggaccaacgtctccgttaaagtcgccaattcaaacggctgttgtgttgtgttactaatcacgggatacaacccttgattttgcgccgtttgttcaataaacggtttaaaagcttgtgccgtttcagcaaacaattgggtgtgaaaagccccactgactttcaatggtaaacacttcgtcgtgggtgctagtcgatttagttcagctgtgaattgctgaataccatttggtgtgccaccaaccacaatctgtttcggtgaattgacattagcaatcgccacccactcaccttgcgcctgaacggttgtacaaatttgttgcacttgcgcaatatttggctcaatcaacgcgaccatttggccggcttgatgttcaatcgcttgttgcatcaaacgaccgcgcgttgcgactaatggtaagccttccgccatcgaaaaggtttggttggcaatcaacgctgaatattcccctaaactcaaaccagcggccgccgtaatcggcacattattctccgctaaaagttgggcaattccgacactcatcgcgacgattgccggttgcgcatactgagtttgcgccaataattctggcgtttgcataatggcgggtaaatcaagacccgtcacttggctagcttgatcaatcacagctcgataagtcggttgattctgatataaatcaagccccatcccagccacttcgctgccctgaccactaaataaaagtccaattttctgcatcgtattgccccttatttagcggctaatgtttgttcaatgtaatcaaccacgttttgaaccgtcacgattgattcgtctggatctaatttgacttctaaatcatcttctaattggttcatcacttcgaaaatatcaagactatcggcatctaattcttcccgaatattagttggtggtgtcactttttcaatctcaacgtccaattgttctgcgattactgcttgtactttgtttaaaatttctgcttgtgtcatgataaaatccccttgtttgttagtttgtttttttaaatttttaataacgtatgatttgaatgccaatcgtcaatccaccgccaaaaccgcataaaacacataaatcaccggttttaatgcgaccttgttggacttcttcgtccaataataatggaatactggcggcggaggtgttgccgtagtgctgtagattcatcggaaacttggacaacggttgttttaaccgtttggctaattgcgtaatcagtcgcgcattggcttgatgaatcaagaaatgatcgacttggtccaacgaatagcccgccgccaaaacggcttgttcaagttccactggcaccgttcgtgtcgcaaaattataaattgaacgccccgacatttggaaaaagtcgattgctaaatgggtttgcgttggtgcttgccaattcgtttgaccggtaaccagttgtcctgaagtcagttgatcgttctgctgacccagagtcaccaatcgttcgcctaaccaagcgtctgcggcttgcgtaccttgtaataacacacctgctgccccatcgccgaaaagaacagcactactgcgatccgaccaatccaacactttggaaatcacttcgccaccaatcaccatcacgtaatcatcttctgattgtagataacctttggcaacggataaagcgtacgtgaaacccgagcaagccgcactaatgtcaaaagcaaaagcgttgacagcttcgatgttcccctgtacaatcgcagcagtagctggcgtatagtaatcgggtgtcatcgtcgccacgataatcgctttgacttgactcgcggctaattgttgctggttcaataactggcgtgccacttgcgtacataaatcagatgtattttcagtttgtgcgattcgacgttctttaatcccggtgcgactttcaatccattcattggatgtttctaaacgttttgctaaatcgtcattggtcacaatttgctgtggcacttgttgggcggttgcaatcattttaaaggccatcttttaacccctatttttttcgagttgactatcacgtggacccacaacaaacgttaattctgctgtgcagacgttttcgccgtcaaccgttgcgctagtttgcacaacacccatatttgatttcgtcttaattaaggtcactgtcaattgtaattgatcacctggtcgagccttccgtccaaaatcaacttgtttggccgctcccagataagccgttttaccggcatatgctggtgatttcaaaattaaaattgaagcggtttgtgcgagtgcctcgatgattaatgtattgggcatttgcggctgatcaggttgatacccgcgcatgaacgattcattaatcgttaaaagcttagtggccacaatttttttatccggttccaacgcctcaacacgatcaatataaatgattgggtagcggttaggaattagcgccattatctcggatgtcgttaatatcgtcataattcccccttgtgattttatgataataaaaatacgatacggcatatcgcatttctatgtcgagaagattatcacatgcttttttagaagtcaatgttagttcgcaagtagtttttaatgatatgagccataacgtactattcatgggctttattccaaatattaaatttcctaattacgtccgtcatccgcctatttctgataccacagcatactatatatatttagtttatgtaaaaatactattattttattgtttttattgacaattaatttgagcagtgtaaaatagtgcgtaaggtgacgtcccttaactattattttcttggaggatttagtttatgaaaaaaaatgtacgcttactaacaacggctgctacagcgatgatgctagctggtgtttttgcaccactaacaacggcgcaagcagcagttgccggtacaaacaccgcgccaacatcaactgtcagcaatcctaaacaagcacgaactgcgattatcactgctaaaggcaccctacaaggacaactggttccttacattagatgtgtccctaatacaggtaaagttactttacactacaccgcccaaaattgcggcttcgttgatggcgatattgcctacctaacgattaaattaccagaacaatttaaataccttgctagtcaacctgaattcgcatcctacatcactggggagatgcgtgaaaccagattgtttggcgataacacacaaccgattaatcccagtaacgtaaccgtttatactgatcgtattattgttgaagtcccaagatcgttctggattggcgtgggcaacgtcactgctgatatcgtgattgattatggtcaattactagaagagaatcatcacttaccagttgattctgcaccagctggttacgaattcattgcgcacttacaatattcatcagccccatgggaccttctcaaggccccaattattggtactaataacgacacaatcttcacttctgaaacagacgccatctattaattatttgaaataaattcctcccaaaattttattaaataattaaaaataaatatcatcaatagggactgtctgtttcaatgtaaatagtccaaaaagccccaaataacatttaaaaaatgttatttggggcttttcatttttaattaagagcaagctctaatctacctcgcaaatgacagacaaaaaggccttttctaatcctcaaacggtctttttgtgacggctatttataacttcgttaacttagtacccttatcctttgctttttcaatcaccttgtcagcccacttacctttgattgcttggtttaatgcctcactttgagccttaatctgttgctgagcctgggtacttttagcctgataagtttttttattttgctttcgatgtgcgtttttaacctgttcaaagcccaccgcgattgcctgttcaatcaaagctttctctgcttttttgacagtctgattaaaggcatgttcgatatccgtgacgtcaatcatccccattccccctagccacacgtaattgttctactaattctgtcaggcgcttctgatccgcctgaatttgttgcgcattgctctctgctagttgagttttagtatcccgaactgttttaaccatatcatcgttactgtgttctacaatttgattaatacgcggtagaacgtcagcagaaccttcaagatttctcatcttggcacaagcaatctgatgcatttggcccaacacttgattactttcacgttgataccaatccaacttagcttcgtctaattgctgttggttagcacactcgatagcctgctcttctaaaagactaatttgctgttttaactgattcggctttaatcccatgctttgaaccccttcgccaacgtttgatcatttgcaatttgttgattaataccacttcgaatgttattaacgaatgtcttgaattcagtctttaaaaattgcgcctgttgaatctgaccttcgtaataatcagtcgggccatcgaccaccaatgctttggtgacacccccacgtgccaatgcagcgtgcatttcctgatgtgataaatgcgggccaaccaaggatgcggttaattgggcctcctgccagagcgtttgtgcttcaacaatcgctttgcgccacattttaatcatgttatttaaggcttcgatggctgtcgtttcgactgatttaaccaacgacatcgctgcagccacatctagcaatatctgctgactagcggtcaatgtcccacttgcttggtaggtttcatagagtatatttaaccgctctaattgaacagctaacatgtctgaagctgatgccttgatattgccattttgatcatattgatagccaccccacatatgctgtttcgtcacgtcaccggttttcttcgaatcaacttcgataacagtgccaactgcggggtcctcatagcctaatgcaaccggatctttcgaatcaatatagttaaaaatcgactgctttaatttggccacccgtgcgcgttgtgcgtcattcatcaagccgtatacattcggcccttcatacaaaaaagcttgccgaattcgttgacccttttcctcagaaatagctcccaaagcataagccccaacagctgcccctaatgaatgaccataaacatcgaattgtgcgtttcgataaatgcccatttcacgagatagggctctgccccccgcttttaattgtggtgttgcttgatcggcgttgccacccaaactgttggctagttgattatggacccgttcagacatgttcgtgatgggtgctttaacttttccggcaattggtacatcattctgaaaccaatcttgacgcgcatcatgccccaaatcgtcggtccctgctaaatgattgaccccggttgacccccggtacatgaccgtcacatgctgtacttgatctggatcaaagttggctgcattaggactatccggcgtaataacgtaagcttgcagccccgtcttcggatcattaataatatcggcaacgtaaccgaatatattgccatctttatctgtaacagctttatttagtttatattgaccatattcaatattggcaaaatctactttttgtttcccattcatctccgcccaattatatttcattgctcactaacctctggtaattgtccactttgaacagagacatggcccttattcatttccaatattacagaaaaatcattactaggattattatttacgtatccggtcagtgatatacctcccattggactatgtttaatcgattgataatcaattacaacactttttatctcatgagtatcgtcctttatccggacatatttctcaataacggttttattttccttaactatttccaccatttcttgatgaaatgctgcctgtttctcatgcatataaaataagcctcctccaagtatgattgcgattatgacaacactactaatgatgattttcattgttttagtcattttttagttctccatcttaattcattatgattaaagtgtcagattcgattacacactaatttcactaaaattcttctaaagtctatcataatcagttgcacgataggtcagattatcatgaacgtctttaaatcggccctcaatgttgtgtaaatatcattttatttgataataattgcaaaataatagacacactagcatcactgttttaacagccttgctagcgtgcctatctatactcaaatcatatttcacaatatagctcatagtttcaataacctttgattttcgtcactatacgctactttcatctttgaaacagttttgcccttgatgtaaattggcatttcggttaagggttgatttaactgctcactaaccgttttagcggattgtcgcgcaatctttttagcagtgctctttttatgagcaactattttcaaagtcgctacactgaaattagtcgaaatacttaatttttctaacgcctttgtttgcgccaatctttgttgttgaatggctttgaattgcttatctaattcatttcgatggctttctgctacaaaatcaaccattaatattctgctccaatcatttctctaaaagattttgttgggttttgcgatattgagcttcattgctttcaatctgctcttcgattgcgctctgatggtgattaagcaactgatcaatctcatttctggtcgttgccaactggttcattaatgatgtgtggtcaacatcgacggcaactgcttgcatcacatagtgatatcgttgatacaaagcttctaaatctgtcgtattttgtcttttttcaaattgtacctgatcggccatcgccaccattaaacgctttgattgccgataatcggcctctaaaacagcttgttttgtccttaatgcttctctttgactagtatccattatccaaacatccccgctaattcctgatcagtggccagcatttgatcaactaccagtttaatattagctgaaagcgccaagtattcttgacccacagcctgtgcttggtctattttagtcgtcaatttttgcgttggttcatcaacgacggtttgacgcctaacgccaccagcttccaatgcttgaatcacttcattgtcagataaatgagccccaatcagcgccgcagacttgatggtctgttgccaaagtggctcaaactcttcaattgccgcatgatactgtttaataatttggccgataccatcgccagcgattcgatttaaactatccgccattgcaattgcttctaccgcatcaacggcaattttttcagcatgggtaaacgtcccacccgatttttttagtgatttaactagtttcttaattgcagactgcttctcatcaagcaaatcgatatcgttctccatttgcgccttcagttgtttcgcctgacccttttgattaaatttaaacgtcgacaacatatgcgtattatgattttttagcatgccgcttgcagttgtttggcaccagactgtctttccagtgaacccatcaatccccaaagttttagaatcggtctccgaccatagatcaccttgatgccgataattcctcaatgactccggatgagccaatgcccaaagccgttcagtattcgtcatcgcattccacgggtccggcgccgaaaatacagttgccgaaacatgataatgactgcctaccaacaacgcaatcgcgcctcctaaagaatggcccgttgtatcaagcgttgcgttcggatacttagtctgaacctgttggtagaattttaaagccgaatcgaattggctagcagtgatatacttctgcgatttttcgttggttaacatcaagtttttacgattaccagcaccgataccctgtaagtcttccgcgacatctttacgatcactaaaattagttccggcatacgcaactgtaatctgcgtataatcgacatccccattttgatcaattggcgccatagccatcccttggaaaccgtttgtgtcatacccatgactatttttagtatcgttagtgtcaacggtctttagaacttgatatttttgaccaccgttttttggataattttcataaacaaattttccacttctaattggtttttttaattttaaagcatcagcgtcataaacaatattatctaaactggcatattgctttgttgtcgtcatttcaacaccgcctcatctccgttactatatttaactattacagaatttttagtttcctttcctattttttcttcaggaaaatctttatcgactccaccataggaaccaccatctttccctgttgcaatttcataccagttatcagaaatttttaatttcacttctatgtaccaagtaccaaaatcattttcagtttttgaaaactgcccaccatctttattaaaaataatctcttctaaatccgtatactcatttctcaatgaaattacagattctctttgatattccaattctttagtcactttattgtccatataaatctttgcccccatcctaattccaatcaataacaaaatgataccacttacaataatcaatatttttttcataaaaatcactggcacctttattttcatatttttttaattctaacataatagttcatatgatttgccactccgacatgaacgaccaaaaatttgttctcaacgtcattcaaatatcatttttattgatacggcaggctacatttcttgttagtatcgctacacaaaaacagcaatcactgtttttttaataattgatacacttttaacaaaaacatattgaatcttatactatttaatttaaaaaaagcaccaaaaccactgatatatcaatggttttggtgctttttatttttcttatagtgcccgtggcaggattcgaacctgtacttggaaacccaaacagcgacctgaacgctgcgcgtctgccagttccgccacacgggcaaaaattgctacaagactattgtaccagtgttagcaagccctgccaatacctttttgccaatctttggcttataatagaatcaaaataactggagggattccgatgcaagttattacaaccgaaatggtgcaaaaagtgattgttaaacgacccgccaatagtcataaaggccagtttggccgcgttctaatcattggcggcaaccaacaatatggtggcgcggccatgatgagcgccgaagcggctgtaaatgccggtgcgggtctggtaacggtgatgaccgatcaaatcaatctgactagcctacacgctcggttacccgaagcgatgtttgttgattatcaagcgcccaccaatcaactcgcacaaaccattcgaaacgccgatgtcatcgtgattgggcccggtctgggcttaaccgcccacgccttaatgttattgcaactcacttttaaaaccgtgacggcgacccaaaccttattagtggatggctcagcactgaccttaatcgctaaacaccacttgccattgcccaaaacacaagtaatcctaacgccacaccaaatggaatggtcgcgcctcagtcagttaccgattgccgaacaaactgttagcgctaatcaacaagcgtcagctcaattaaaccaaccaattttagttttaaaaaaacatcacactgaaatttatcatgaccaagtagtttaccaactaacaatcggcacccccgctttagcgactggcggcagtggtgacacattaactgggattattgccgccttttgcggtcaattccaaaccagtgtcgcaacggtcaacgctgcggtttatactcacagcgcgatttctgatcaactcgcgcaaaccaaatatgtcaccttgccaactcaaattattcaagcgttaccggcgtttatggcgcagatggcacaatcataattaacaaaaaagccaactcagtgagttggcttttttgttattcttttaaggcttcaatttcagccgtggttaatgctcggtattgcccaggtaataagtccgtgggcaaggttaacgaccccatcgttaaccgttgcaacgtcaagacttctttgtcgactgcgtgaaacatgcgcttgacctgatggaacttaccttcatgaatttcaacggtaatcagactagtttgcgtctgttcatccgtttcgagaaccgtcaattgcgctggttgcgcttgaaaatcacttaattggattcccaccgcaaactgcgcttgatccgtttccgtcacaatcccagcaattttagcctgatattttttagaaacatgtttcttaggactcaataacgagtgcgctaaatcgccgtcattcgttaataataataagccggttgtatctttatccagccggccaaccggaaataaatcagcccgataatcggctggtgttaataaatcgatgaccgttttttgcggatcagtggtcgccgaaatcacgcccgccggtttattgagtaaccaataaaaatcagtttgataatgaatcggttcgccatcaacttcaacaacggtcgcttcagtcacctgaaacttaccgttgccaatcacttggccgttaacctggattcggccggccttaaaaagggcttttaacgattgacgactccccacttgcatataacttaaaaagcgatcaattctcattttaatttcaactttcttctaaagcgatccatgttggttccaagaacgaaatcagctaaccgagtcttcaacgctaaggcagcgtaaacaccggctccgagtcccacactaatcattaagactagaacgctttgcaaccgactgtatggattgaaaacaaggtataacaatttaaccacaccggcagttactgcgtacatgattcctgagaagattaagacccccgctaagcggcgcatggtttgcaacacatcaaaatggtagttccgtcgtaatgcgaccaacattaaaatcgaactcgtggcaaatgctaaaccagttgaggtcaatggtccgtaaacgcggaagaaataaattgctggatattgcgccacaattttaacaatgaaaccaatcattaaataaaagagtgccattcggttttgataaaggccttgtaacatcgcccctaaaactgtgaacaagcctaataaaattgagatgtatgatgaatattgtaaaacattgattcctaaagcatcgtaaccataaaataatgtgtacaatggaccggcaacggccgccatcccacatgctgcagggagcatgacgaaactaaagagctgaatagtactcccaatttggcgctttaattccttttgattcccacgcacatgagcagctgacatcaatggaatcgcagtaaccgccatcgctgtcgctaaggaaaccgtgattgaaattaatttattggcattggcggcaaataaagcatacaaattacctaattgatgattattggcaatgacaaaatcatgcatcattggtttaaaggtatattgatcaataatataaacaagactgacgctcgcatcaatgatgataaatggaattgactgacgaacgattccttttaataagtcagttgtcgaaacttcgattgcattattactgcccgcaattagaacgtcgaaccgacctttttgtttgaaatagtaaaaaactaacagtaataaaccggctgttgccccgatgaaggccgcaaatgtcgcttgcgttactgccttaacataatcaccgtgtaacacctgcataatcataaaagccgagactgtcatgtataaaactcgggcgacttgttcaataaattgtgaaattgcagatggtgccatttcagcgtaaccctggaaaaagcctcgcataatactcaataacggaatcactaataatggccaacttaatgaccggaaaacgggtaccatccgcggatcaccagctgataagattggcgccaataaatacaaggccaacgctgataagacgcccattgccatcattaagaataacgattttttaaataatcggtgtccaatggcgtactcgttcatttcattatagcgggcaatttgtttggataacgcccccggaataccggccgttgaaatcactaagaaaacactgtaaatttgataaccttgtgcaaaaagtgtattggcttgtaaaaagttggtgccaaaccaaattggccacggaataacatagacagcccctaaaattcgcgaaaaaatactgccagctgtcatccaagcagaaccgcgtaacatcttactctgcgaagaagtgtccgtagtccccgtttctggtgaattggtcatttttcataactccttgtctaaacatcgaaaagcgtcttcctactattctagttgattgccaccatccttgcaattcctttaacaaaactttagaaaatatttcagagtgcgaattctcattggagcttctgagcattagcctagttccgtgaataaagtccgtactttggactttatttgcgaaacgtagctaagcacaggaagctgtgagaacgagcacgttttcgaagagtgctgtgcaagccgttcagcttctgagtatagcctagagtagcgaattatgaccgaacttggtcatgatttgctattcgtagctaaacggaagaagttggtgtgcacagcacgttttgatcagagtgcgagttctcacgaaagcttctgagcattagcctagttccgtgaataaagtccgtactttggactttgtttgcgaaacgtagctaagcacaggaagctgtgagaacgagcacgtttcagaatacaaattctcacacaacatcaaaaaaagccaactactccttttttcaggaccagttggcttttcagttatgctgcttttttcgtcattcgaattaaccaccacgttaataaaatactgatgaaaaccatcgcagcgccaaagattggcgtgctgcccaagccccacgcggcggatgcttgaccgccgactagtgaaccaatcgtaatcccgacattaaacgccgaaatatttaaagccgaggccaatggaatatcattcggtgtatatttttcagctagttgcacaatatagagttgcagtccgggaacgttcataaacgcgaagaagcccatcactaaaacgttgattaagccgaaccagtgtccattcaaggtgactaaaaagaaaattagggtcactaataatccgataaacatctttaaaagcgccaacaacggctgatgattcgaccatttacctcccaaggtattaccaatcgccaccattaaaccgtaaatcactaaaataatgacgaccgcacttggcgaccaacccattttcgtttctaaaatcggcgtcacaaacgtatacacggtaaaagtacccccgtagcccaacgccgtaataaatagcgctaaaacgatttgacgattcatgaaaacccgtttaatcccactaaaatgacttggctgacctaatggtaaatcgttcggcactaagaaccagttggcgattaaaccgagcaccccgatccccgcaataaagataaacgacatatgccaagttgatacttgcccaatgaaagttccaaggggcacgcccgtcacggttgcgaccgttaatccggtaaacatgaccgcaatcgcgctcgcccgccgttctggttcaacaacatcggcggcaatcactgaagcgattgacataaatatcccgtgtgccaaggctgaaatgatccgccctaacaagacaattggaaaaataggcgcaaaagcgacggttaaattaccgacgataaacactaacataatccctaataataaatttttacgcggccaccgactggttaaaatcgctagaattggggcaccgatggtaatccccaacgcatacatcgaaaccgtcaaaccggcttgactcatcgtaatcccaaaatccttaatcatcagtggcattaacccgacactaatgaactcggtcgatccgatggcaaaggcactgattgctaaagccaataacgttaaattggcacgttgtttctgattcattttccacactcctacactttttattgatgtagtctattattcaatagaagtggttactgcacaattacgcacttttttgttattaggttactcaaaggttataattgggtattatcacaatgaaaaggtgaatcaaaattaaaaatggatgagaaaacctataacatcggcgttgaagcgacgattgaaatcatcggcggtaaatggaaaccaatcattttatgccatctgcgcaatcaacccttacgaaccagtgaactgtgccagaatattcccggtatctcccaaaaagtgctcacgcaacaattgcgcgaattagaacgcgatgggattattaatcgtaaaatctatccagaagtcccaccccacgttgaatatcgtttgtccgaatacggtcaatcactcaacaagattctcaatctactctgtacttggggtgaacaaaacatcgaccgccgtcaacaagccggtgaatcgattaaggtgttgcaccacgaccagattaatccactttattaaccaaaaaactagccaccactattttcaagtgctggctagtttttttgggtactactgagtctggcacttcggttttaacgtgcttttcaagtagccttttccggttaacgacgaactgggcatcatgagttaaaaacactcataacacccagctctaggttaatcctcaaagcctgaccaacttgaatcaggcacttcaattttaacgtgcttccactcacagcttcctgcgcttagctacgtttcgcaaacaaagtccataatccggactttattcacggaactaggctaacgctcagaacctaccgtgagttccaggcacttcgatcttaacgtgctaacccaagctgacctttccgcctaactacagaattgcccacacgattaaagttcaaatcatatgggcaattcttaggttatgctcgaggtcaaaccgcttgtgtgcgcacttctttataacgtgcttctcaaccagcttcttccgtctagctacaaatcgggaatcatgaccaaacccagtcataattcccgattttaggctatactcagaagctacccggttgaatcaggcacttcgatcttaacgtgcttttgagttgcaacaacctccgcttaacctaaaattcgcaattatcttaaaaatcaagataactgggaattttctgttaatgctcagttgctgagcgcaactcaacacacttacttctttaacgtgcttctgagctagcttcttccgtctagctacaaatcggacgtcatgactaaacttcagtcacaacgtccgattttaggctatactcagaagctgaccagctcagtcagcacttatttcttttaatttgctaccacattaacaattttatttggtacgacaattactttgcggactgttttgtcggcgatgaagtcggcgattttttcgttggccattgctagagcttctagtgcgtctttggccatgtctttttcaacggtgactttagctttcaacttaccattaacttgtagaatgacttcgacttcactatccactagtgcagcgggatcgaacgttggccatgcttcgtaactgattgattcagtatgcccaagcattgtccacaattcttccatcatatgcggtgcaattggggctaacaacttaacgaagccttctgcataggccattgggaatgtatcggctttataagcatcattgatgaagaccatcaattgcgaaatcgcaacgttaaagtgcatgttttcaaaatcttccgttacctttttaacggtttcgttgtaagatttcttcaacgtttcatcgttggcttggactaacttacttgaaacttgatcttgttcgtcagtatcttcttcagtgtataaacgccatacccggtccaagaacttacgtgcgccggctaggcccttttcactccaagaaattgacgcgtctaaaggtcccatgaacatttcgtataaccgtaacgtatcggcaccatagcgatcaaccacgtcatccggattaaccacgttgccttttgatttcgacattttttcgtggttatcgcctaagatcatcccttggttatacaaccgttggaatggttctttggttggcacaacaccgatatcatacaagaatttatgccagaaacgaacataaagtaaatgtaagacggcatgttcagcaccaccgatgtacatatcaaccggtaaccattcttctaatttagcaaaatcagctaatttatcggggtttttaggatcgatataacggaggtaataccatgaactacctgcccattgtggcatcgtattggtttcacgacggcctttacgaccattttcatccgttacgttcaaccaatcagttaggttggctaatggactttcgccagttcctgaaggtttgatatcgctcgtaattggcaattcaagtggtaattggtcttcaggcactactgaactcgtgccatcttcccaatggataattggaatgggttcaccccaatagcgttgacgtgaaaacaaccaatcacggagtttgtaactcacttgttcgtgacccgcatcatgttcaactaaccatggaatcatgcgttcaattgcggcttgtttgtctaatccatctaagaaatcagaattaatcactacgccagcttcgtcataaacggcttcttctggattgccaccagcaacgactggtttaatcggtaaatcaaacttctttgcaaattcccaatcacgcgaatcatgggctggtacggccatcactgcgccagttccgtaagtggctaacacataatccgaaatccagattggtaattgttcaccattcactgggttagtggcataagcaccagtgaatgcaccggttttatctttcgccaaatcagtccgttcaagatcacttttgtgttcgatttctttcaaataagcatcaacggccgctttttgagcgggagtcgtgattttagccaccaaagcatgttcgggggccatcacaatgtagctgacaccgaataacgtgtccggacgcgtcgtaaagacggcgactgaatcagtttgcccttcaatcgcaaacgtgacttcagcgcccttagaacggccaatccagttacgttgcatatctttgacactttcaggccaatcaaccgtgtctaaatcatcgattaaccgatcagcataagccgtgattttcaacatccattgacgcattggtttccgataaaccggatagccgccccgctctgttttgccgtcaatcacttcttcgttggcgacaacggttcctaaatcaggactccagttaacgggcacttcggcttcataagccaaacccttttcatacatcttttcaaaaatccattgcgtccacttgtagaaactaggatcagtcgtattgacttcacgatcccaatcgtaagaaaaaccaagtgaattaatttgacgtttaaacgtgttgatatttttttgcgtaaaatcaatcggattattaccggtatctaacgcgtattgttcagcgggtaagccaaacgcatcccaacccatggggtgtaacacgttaaagccttgcatccgtttcatccgcgctaaaatatcagttgcggtatagccttctggatgaccaacatgtaggccttggccggatggataggggaacatatcgagtgcgtagaagttcttcttattctgatcttctgtggttttaaatgatttgtggctttgccaataagcttgccacttttgttcaactgcgcgatgatcgtaagtcataaaaacactcctcttctggtttatttaacgaaaaaaaaagtcctatggtataaaataccataggacgaattgaccgcgatgccacctaagttctgcccaacacaaattggacaactctctggccttaacgcggctcacgttccaacttacttaattcagtcgaaaactcaaaggcgagttcatcagtattaaagacgtattctcactaaccatacgctcgctgaacacttaatactgactactaatcctcttcaacgttaaataattgtacttagcataccaaactcttacttcaatttcaaggtttgaccaactaagattaaatctgaatgtaaattattgatttgttttaattgcgtgattgataattgattcttttgcgcgattgaccagagactatcaccagacttaacggtataagtcttcgctgtcgatgcagacccttgattattgttcgacatactcgtcgttgtactgcctaattttaacacttgacccggataaataaaattatttttaatattgtttaattgaactaatgttgccattgagatgccagatttattggcaattgcccagactgaatcaccagatttaaccgtgtaagtttttccagtttgattagttgtcgttgaacccgaacccgtgttgccggtactagtactaccagaaccactttgactcacaactaagacttgaccagggtagataaagttattgcggatactattccacttgactaaattcgccatcgaaatgccgtacttattagcaatcgcccaaactgaatcaccggatttaaccgtgtatttcgtgccagttgcgggtgtcgttgtgctgcccgtattaccgctgttgctgttaccactgccagccgctgatttagaaacgattaacacatcgccaggatgaatcatattatttttgatgttattccaactaattaaatcggtcgttgagatcccatatttattggcaattgcccaaactgaatcaccggatttaaccgtgtatttcgtcccagttgcgggcgtagttggtgtcgtcgtgctgccggtattaccactgttgctgttgccgttaccactgccagccgctgatttagaaacgattaacacatcgccaggatgaatcatattatttttgatgttattccaactaattaaatcggtcgttgagatcccatatttattggcaattgcccaaactgaatcaccggatttaaccgtgtacttcgtcccagttgccggtgtggttggtgtcgttgtgctgcccgtattaccgctgttactgttatcactgccagcggctgatttagaaacgattaacacatcaccgggatgaatcatattatttttgatgttattccaactaattaaatcggtcgttgagattccgaatttattcgcaatcccccaaactgaatcaccagacttaaccgtgtatttcgtcccgttagtcggcgtcgttgtgccaccattattattgccggtatcgccagtattgttaccagtactactacccggtgtgtcatattgcgttaaatcatattgttgaatcaaacgattcaagcttgacgcatagttagtagccgtcgcataacgcccttgtaaatattgcgttgcttgttgataactgctcgtatagctcttgaaggccccttggtaataaggcgttgaaccaaatgatgtatttttcaaaacgtgtacgtaatcttgcaatgattggtagtatgatgggtattttctaaaagccgcttgaatttggtaaatattaccgtaaccatcatcttcattagtccacatataaactgagttaccattgtatgagcctttgaccccgaataagttataattaggcgctttgcctaatgagctactcccaaaaccagattccaaagaagcttgggcaatcatgaccgaagcgtataaattattatcgttggctaattgccgtgctgaactggcaattgagttaatgaaagattgagcacttgtgctcgctgctgacataatcactcgagcagacgccgcattggcacttgtactttgaacccccgcaatcggctgggcttgcgtaggtgttggttgggctgacgccactttattagcatcattttcagttacttgtggtttaactgctggttgttgtgtggattggctagtgccagttgtttggctacttgttgattgtgcgctgctagcaaccgttgaactagtcgtactcgccacacttgagctagtcgtagtagccgtttgatcttgattattttgaacgtcttcagtggccgctttagctttgccacttgaaaaactaggcgcaattgcggagcccattaagacactggccccagcaaacgtcgttacgttccgcatttttttgatgcgaatctcgtttttttgtttatgtaaatttaatttctgaattgcgatgcgttgttttctggtttctttcacttttagaccctccaataaagtcgattgcacgatttaattgagcttcaactagtacatagtataatattaatttctcgacaaaacaatctatttgttaaaccactttaattatttgtactattacatcaaattattgtatgatcgtagttaactagaaaggaacactttacatgtcgaatcaacaaaaacaaatttcattcacactgacttgtttcagcgctttcgttctcttactctttagtattacaactcgcgccgcttgggtcaagcaatttgattatacgattaatgactggcttcatcaaaatctatccttaaagttcaaaccaattatgattggcatcacgactttggggaatccaactagtatcgtcggacttgttttagtggtttgcctagtctgttactattacaaattatattcggccgctggtttcgtgctcttcaacgtcacgatttataccggtctaaaccacgtcattaaaagcctagtcaccagaccacgtcctgcttatgaacacttcgttcacgcgggtggctacagctttcctagtggtcatgcttccggtagtttacttttttgggggtcattatggatcctaagtcgctatttgattcaaaatcggacctggcgccgagtttcgaccatcgtctgtggactgttccccttactaatcggtctcagtcgtatttacgttcaagttcactatccaaccgatgtcctcggcggctttttattagcggccggttgcttaagcctaacttggttagcctttaaacgacaacaattattgcccactcttcacgattaacattcaaaggagttttcacccatgattctgacagatcccgttcaattcgcccaccaactcttaaaccaagccgttcgccccggtgacaccgtgattgatgccaccgttggttacggtcacgatacctactttttagccgaaaaagtcgccgaatttggccatgtttacggcttcgaattacaaaaaccagcgcttgatatttgcaccgatcgtttaactaaagctcatttgcatcaacaagtgaccctctacaatcaaggccatgaacggattattacggcattagaccccgacctcaaagtccaagcggccatttttagtttgggcgctttgtcggccgagaccgctaatcaaccgactttaccgaataccacaatttcggcttaccaccaaatcttatcgcgcttgaatcgtggtggtttactggttttcgtgagtgaaacccaattcaacgcctccgacgaagaaattaattatttagtcgccgacctcactcatttaaacccagactattaccaagttagtcgttatcaaggaattaaccactcaagcggccaagtcctcgctatcgaaaaaaaataaaaacaactaaaaacacgagccgccaaaataactttggcggctcgtgtttttaattatactagtttagacaatcttagtgccatgtgcttctgtcaaacccaattcagtcataatagccgtgacattatcagccgtaataccaccaccaggcaagatgacaagacgaccgtcggcaatcgttacgagttcttttaagtgagcttgattcaaaggttgatcaagtggtccaccatgcgtcaaaatacgtttcacatcatgttcggctaaccaatcaattgcttcagcttgttgtgctgttggaatctcatcaaacgccatatggaaaacgacttgcatcccattagcggcgccaatcaacatctccatcgcttcatcgtcgatttgattatccggcgttaaacaacctaggacaattccatcggcacccaattcttgggctgaaaagatatcggcttccataatttttaattcttgatcattatagacaaaatgaccaccgcggggacgaatcatgaccatcactggcacatcgtgttcgtgggcgtagcgcacggcttcagccatcacgccacgactgacagtcgtcccaccaacggctaaattatcgtttaattcaatccgtttcgcaccttggcgaattgcggcggggattgctgtaaaattctcaacacaaacttctttgattaacaattgaaaaactcccttcaaacttcaattaagcgaataacatggcgcctaatactaataatcccaagataatccggtaccaaccaaatactttgaaatcatgtttcttaatgtagtccatcaagaatttaatcgacacgattgaaatcgcgaatgacacaaccattccgattaacagaatgatcgtttgatcacccgtgaacgtattgccttcatagaagaacttgccaatcttcaacacgctgaccccgaccatcgttggaattgccatgaagaatgagaattcagccccgacaaatcgagaggtcccgataataatcgcccctagaatcgtggcaccggaacgtgaagtccctggaataatcgataaggcttggaaacagccaatccaaaaggcggttaaataaggcaacgtatttaaatcggtaaatttcggcgtaatgctcttattccgattctcaatcacaatgaacaaaatcccataaaggatcaacatgctggcaacaacccaattattcattaaatgggcatccatccaatcattcaacggaaaaccaatcacgactgatggaatcacggcaatcacgactttagaccataacgtccaagtttgtttctgttctaaacccgttttacggggtgaaaatgggtttaacttgtggaaaaacaggacgacaaccgctaaaatcgcgccaaattgaatcacataattaaacatatccatgaacgctttggtttcgtccatctttaagacactaccgactaacactaaatgaccggttgaactaatcggtaaccattcggtaaaaccttcgacaatccctaatataatcgttttaatcacattcaacgtaaacacaacactcttcccttcgtaaatcataatcgcttattagtatactgattttgaagcctgataacagcccctaatcaatagcttaagctttttttattataaggtattttcatcataggctaaatgccgcgcttttaaaacggctctaaaatcagccggcaacggactcttgaccgtaatgattttctcttcaaacggatgataaaattgtaattgccgacaatgtaacgcttggcgcggcagtaaatcatccgcttcgccgtagagattatcgccaattagcggatggccaattgatttaaaatggacgcgaatctgatgcgtccgcccagttaataattgtaatttaacgagcgttgcatcatcgccgtgcgctgcttgccaatactccgtcaacgaacgcttgccacccggtgcgactacccgccgcatgtagaaatcttccgaccgtttaatcggtcgatcaatccaggcgtggtttggcatatcttcacgcatatcaccactggcaatcgccacgtaagttttttgcagttctttagattgcagctgcttatcgactaagctgtgggcaaaaccgtgtttggtgaacatcatcaaaccacttgtatcgcggtctaaccgtgtcaccacatgaacgacctgactttcagcgtgttcgtcaatcaaatattgtttgacgtaattggccatcgtgttacttggatgttggggcgctggcaacgacgccacaaacgccggtttatcgaccactaaaaaatggtcgtcttcataaaccacccgtaaatcccctttgacgggaatcacgtgttcgacggccacttctggtgcgagatagatggtgactaaatcattttgaacgagtttagcgtttgtataagcttcctgcccattgactagaatcgttccgcccgcaaatttaattttggctaactgacttctagataaaccgtggtgccgtaaaaaattacgaaggacgcaaccttctgtttcttgatactgccaatcaaatttcatgttttgacccgataaatgcatcttcgacacggtcccagaaataagtgtgccggtaacgtgcaaattgtattctttcttttgcgattttaaattgcatttcagcaattggtcgatccttcgacgtaaattgatcaatcgtgaccacgtagtcactcgtcttcgacggtttcaatagtaaccattcattggaaggtaagatgaccggcgaggataacgtccggtagacccggttgttaattgacgcaatttcagtcagttgcatagcgtctaattgtgggtgtaaaacggcgccgccaatcgatttactgtaggcggttgacccggttggtgtggaaacgcacaaaccgtcgcccctgaagctttcaaaaaagttttctttgatgtacacgtccgtccgtaacgttgccgcataccgccgcaacgtcacttcattcaacgcgagttggcgctgggtttcacccgtatccgcatatttaattttaacttcgagtagcggatagctgatgctttggcccatatcctcttgcaacgcgaccactaaatcttcaacttcaaagtcacgccaatcggtatagaagccgagatgacccgtgtgcacaccgataaaccggatatggtccagttgagcagcgtatttatgaaacgccgataacagcgtgccatcaccacccaccgagattaccacatccgggcgttcgctttccataatgaaaccggtactcgttaactttttggtcaaccgatcagcaacatgtcgtgatgagttgccatcgttgctaaaaaccattactttcaatcggttcagtccccttttgagtcatttttaggtgtttcatcaagcgtcttttgccatttaccatacgagaataactgttgtgcttcttgaatttcttcccgaatttccgacatttctttatctagcataaaggaagcttcggccgcccgtttcaaacgcgccttcaaactgtctggaaattcgccttggtatttataatttaaggaatgttcgattgtggcccaaaagttcatcgacatcgtccgaatttgaatttcggccaatatttttttctcaccactaatcaattgaaccggatattcaatcacgatatggtaagaacggtagccacttggcttaacgttcgaaacgtaatcgcgttcttcaataatggtcatatcggtccgttggtgtaataagccaacgatttcatggatatcttccacaaactgacacatgatccgcaaaccagcgatatcttgcatgtcctgttctaagagttcttcagtgatgtagcgtcgttgcatcttttctttaatgctatcgatgggcttaacccgaccggttacaaactcgataggggcatgttcgttgttctgttgatattgtttacgcatgccacgtaatttaattttcaactcactaaccgcttgttcatacggcattaggaattttttccaattttcaaccatcatagacccctcattcaatctgtcacatacagtgctattttaccatagattagttttgtttcgccacgaaacgtccgaaatacaaattcgattacaattccacttttttatgctaggatagtcttattgtaaataaggagttggattagtgactcaaaccattgaacgtgaatttaaaacgttaattaccaaagcacaatttagtcaaattcaaaaggaacatcctgaagccttaacggtgcgccagaccaatcattattttgaactgcccggccaccaattacggcaacaaggcctaggcctgcgggttcgccagtttgcagagaccgccgagcaaaccttaaaaatccccactcattcggttcaacggaccttaaccgaaatcaccgaagcgctttcattagagaccgctaaacaactaatcgagcaacagaccatccaatccgatggtcccatcatgacttattttaatgagcaagcattaaattggcctacactctcagtttggggctatagtacaactgaacgaacaatcattaatgagccacaaggtcagttaatgctcgatcaaacgcgctatccggatcaatttatcgattatgaacttgagtttgaagtcaccgacttccaaatggcacagccatttttcgaacaactggtccagcgctattcaattaaaccaacacccgtcatcaacaaagtccaacgagcaagtcaccatcaagcacattaattgcaaattgggtgcactttgcttaaagtagtcaaatagtcttatctcatcttaaaaaatcaattagtttgggggaacagctttgttagaagtttttttatttattaacccgatcgggcaactttgtttacgttctgaagaagcactgattaaaattattgaagaatcgaatgatactaatattcattttaaatttattcccgttttgaatttaaaaaacgttgaacattatatgcattttcaaaaattgaatagtcatgatttggatttacgcaaccaagtttttggtacaatctaccaagcagtcctggcttataaggccgctactttccaaggcaataagaaaagccgtgcttttttaatgtgcttacaggaatctttccgccagtttgacgcgccttttaacacgaccttagtgctttcaattgccgaacaagtcggtttagacaccgaaatgttactcgaagattggcacagcgaactcgccaaacaggcttttgatagtgatcaacaattggcctgtgaaatgaacattcaaaccagcccctccgcagtcgtcttcaattacgctaaaggccaacatgattcgggtctattgattgaaaattgtgattcttacgatttattgaaagaagtccgtagtcagcaaactgacgccgaaacaacctaccaaacattaagtcgccaacaatctaaatttaccaacgttgccttccgggttttaacttaagcccctcatgccaaaaagcctaacgttatctttaaacttaaccgttaaagataacgttaggctttttatttaaattaatttttgttggtcttttaacagtcgatagctaggccaatctttcaaaatcgtggccggcaataacggctgttgaaggcgcgtcgcgtaatcagcaaaggtgctgattggttgtcgatcaagtagccaccgtactcgactgataaactgccccgtttcaaataatggtggcacataatcaatgcaataacaccaacgggggatcgtctgtaaggttagtccttgttgataacacgcttgttgcagactgactagctgtggatccattcgaacgaggcgattttgaatcacctgccgctgttgtgcgatgccgattggtgaccattgatgactccctatcaagcttgccggttgcgccattaaacgtaaggcttgcggttgggttaaataccgagtctgccaaaaatagcctttgaaatcaatcgtcacaatatgatggtagagtaaccacttccgttgctgtggtgcataaccgaagagataaaaaccccattccggtcgatattgcataaacgctaactgctgttgactcagccaccgatatttcggccaaaatcgttcaccaagcacccagatgacggttaacccggccgctaaataatcattcgtccgttgtgccaaacaagctggcgttaagggactgcactgatattcaacaaccactgattgcgtaccccgagtcaccaaaacatctgcgcgttggtgctggccgattgggacctcgtaggcgacttgataatcactagcaatcgccaacgtcccaatcgcccttttacccagctgatggatctggctttcaccagtcccgccagttggtcgaacatgggcaaagtacggtgcgactcgttgaccgccctttaacatgaccggttgttggcagtttggacaacacagcggttgggttttagcgaccgctgccgttgcgagcactaattcgccagattcagtttgtgcaactttcatgatttcacctccctaattaatcattcgcgaacaacccaataattatcgtgtctgattaattaaatagagattttcatcatcaaaaacaggcagcctcccagatttaggagaatgcctgtttttttggcctctaaatgacctgacgctgctataaatcagcaacaatttggggataaaaagcctctaatttagaagaagcgcttctggtattcacactacaacgttatttcaccgaccatcagatcttgttttgcggcgctagtgcctaaatacatttcgtacgtcatctgttctaattgccattcgttgagttctggattaaaccactttagtttatcaatcaaacaactaatttcaattgttttttctgcccctggagccagactgactctttggaaaccgcgcaagagtttaacgggccgatcaatcttagaattcataaacccaacgtatagttgtacgacttcagtcccttcccgattccccgtatttttgatgattgctttggctttaacctggtcttcggtcttagaaaatgtgaccattgaaatatcaaacgttgtatacgataagccgtacccgtacggtcttagtggcacaacgccttctttttccaacttagcgtaaccgtgataataatcatagacttgctgatcagtttgccaattaacttgtggtaggtcggcttcagcgtatggaataacgtaggggattttgccggatggattgacttgccccgctataatttcacccaacgccgttccgccttccatcccaggatagtaagccattaaaattgcgctgacttttgcttcccattcggtcatcataatagtattgccacccactaatacaaccgtcgaattctgattaaccggtccaaccgctttaattaattgtacttcatcggcatgtaaccctaagccgttgacccgatcaccaccacgcgcgccggtgtaattcgtctcctcactcttagaaacaaattcgccctcatcatcatagttataaccgacaacgaaaatcgtggcatcagcctttgttgctagctgtttggcgtactctaaatcttgaccatcatactggatgacctctgctttgggaaaagcattcgcaatcccttgcagtggcgtgatgacataggcaggccgcacagcactcgatccttgatcgccagtcaattctttatcagctaaatgaccaaaaaccacaatttttcggattctatttgcaacaaggggtaacacttgttctttattttttaataaagtaatcccttcacgtgcagattgtagcgctaactgacggtgctttttagaaccaaccacagtttgatcagccggtaccttagagcgttcagcttcaaaggccaatagcgtccttaaaatccgaagtgtggcttggtcaattgtttcttctaaaacttgaccattacgcacagcttcaaccagtttattgccaaaccattctgtcgtacacatttcaatatcttgacccccattggcagcggccaccgtgtcacgaatcccccaaaagaagtcgctcatcacgaaaccatcaaaatcccattctttttttaagacttgatttaacagataatcagaatgtccacaaggcacacattgataggcattataggcactcataatactgcccgccccggcatcgacgcaatctttaaaatgcggtaagaaaacttcccgttcagttcttttatccattttgatagccactttaaaacgtgaacattccatcgaattaaacgcatagtgcttaacacaggcgattactgcttcagcttgaaccccagtcactaatgctgaacccattttaccaagatgaaaagattcttcgccgtacgtttcctgactacgcccccaacctggattatacggtaaattaatgcaaacgcccgcaaacgtgttgcccccatatgcttttgtttctaaaccaatcgcgtgccctattttttcttctaattcagtatcaaaagaagccccgcgcaacattgagactggaaaacaggttgtttgaccggtgtcacaaacaaccccgcgtgggccatccacaaaattcatcgctggaatatttttttcagggaggccacctgcgggatacggtctataattataatgtttctccgcatttgcctgcatttcagcgagcaactcttttgcatttttattaccactcatcataaagactttctctgttaacgatagcttttgcaacaacgcatacgcttgttgcgtgtaacttaatctctgcgccttatcaatcattatcatttagtctcctgtacaatttttttagtctagtgacggcttcggattgatcaaaatctaaataaccgttaaccttttcagttgccatttgatggactgattgttgtctaaagacgaacggcgtcaccccgacatccattttaaataagcgataaaacgtattttctgacccaaatccgcactcatcaatgatatataaaatcgttttatccgtaaaacttaacatatacttcgcttgatccaatcgataccgttggactagctcacgaaaactctgcccagtcgtcttcttcaaaaatcgatataactttttttcgttgatcccgaaatcattttgaattgcttgggcaatatctgaatgtctgtaatttttttcgacgtatgcgatgattctcagtagttgttccgaatcaccagtttcctgaccgttagcgaattgacgtatctcgtgttcggcattctcaaacaattctgctaatagttcatatatcttactcttcaatcgatagtccgacgcagccttatctaagctaattaaaccaatctcagccaatatttttctgtatatcttaatatcaattttgggttccaatcccctttgttggctattcaaaaaaaaggcatattgttgaatgccatgttttgattctggcaaattctataattaatcagaacagaaattaaaatttaggatactcgtttttttgatttgaacggaaattgatgagtgatggcgcgcgttaaaaatttataaaatatacaccaattcatacaacatcttcgctaaatcatgatcggccaacgtgtttaaaaagttgatgaagcgaattttatccggcgctttcaaaaactgcgtccagatttcgttcttcaaatcgtattcaatttgtgcctgattcaacttattgaataaacgatcgaccactaatcgccgttggggcataatccgtaaacgatgcagactaaatgtgacttgtgattgccgcgattcagcacaggaatagataaacgctttatcattttcaacgagttcaattggtgtgacattgccgctcccacttttaatggctggttcgaaatcattaacaccgcggaattgacattgaaaatgccgcttttcgggaataatctgacctggatcaacgacccgaatggtcaattccttattcaaccaatcaaagataaaatgcgtgcgcgccacttgtccgtctagatgttcatataagacgtattcgttactcgcccccgggaaaattaacacttttaagacttccggtagttgattgacatccgccatgtagttcggattcaacggcacaatcgccccagctttggcaaacaccggaatccgcgtttcatcccggaagacactcagtgttgtatcaccaccgtattttaacccgttaaagaaatcaaaccacatgccttttggcaaccaaacgcggacctgactttgatctaaatgacgtaattttggcgtgacgactggcgcgaccaataattccgttccgaataaatattgatgctgatttttaaaggccaatggctgatcataggtataatacatcggtttgaccagcgggacccccgcggcatgcgtttggtagttcgcgctgtctaaatagggtaacaattcgtgccgtaaccttaagaaacgaaccatgttggttgcggcgaaatttttatagcgccacggttctttaccattaaacggattgttggcactatgcaaacgcatgatggggctaaaaacgcccaattgtaaccaacgcaacgccaattcatcgtcgcgaatgccacccatatgcccgccaatatcgtgactccaccacgtgtagccaatgttggcggccgtcgctgtgaaatacggttgaaatgctaaagcggcccacgaaatatacgtatcccccgaaaaaccaatcggatagcgatgactgccgggtccagcataacgtgataagatcaacccttcgccatggtgcttgtccgcactatcccgataatggtaatgatttaataaccataatggatcgacatcccgaacccctaagttaccgccttgttgccaatccaaccaccagaaatcaacgcccatctcttcaaggggttgatgcacatcttgaaagtaagtcgctcgaaaagccgcttgattcaaatcaaacaaggccggttcttcattgctttgatccaaccctaatttttgagcgaccactggatagacggcttcataggcccgaatgcccgctgccggatgaacattcaaagtgactttcaaacctctagcgtgcagtgccgctaaaaaatgggcgggatcgctaaacaacgcttgattccacgtataacccgtccaaccagaaccaaaccgttttggaatatcggtgagatgccaatccatatccaacgtcacaacactaaacggcaagccgtcccgatcgaaatgattgagtaactcagtcaaacttcgctcgctataagcccaataacggctccaccaattacctaaagcgtaacgcggtagcagtggtgttggcccggttaagcgataataatcctgcaacgctttttgaaaatcgtgtccgtatgcaaaataataccaatccgttgtcccaacatcgcgtggtttaaagtaatcctgttctaaaataaaacttgccgaatcatcaattgccgcaaaaccattgtaggccataatcccaggtgctaacggtatcacgccgtcagccttgtccaaagtccgcacggtgccgcccaaattttcaaccgattcaccaaaatgccaccgattatgataatccgaatagcggtaattcacatcgatatataacgtatcggccgcaaacggtccccctttgtaatacaaatgataataattcgtgataatttcaacttcaaaatgattatgagccgtcaaaacttgataaggcacttccgtaaactcgcgattttgcaccatctgagttgttcggtcttcaaactgaccgtcagctgaatattccatccgcaataagcgttccgttaaaatcgtaaaccgatactgctgacccctaacttgattggtcatttgatcacctcatttaaaacgagcttatcaacttgacccaaaagctgtaaagaaatctgtctactaaacgcgggtttgcaatgcaacttgtgcggccgccaagcgcgcactaggcacccgatatggcgaacacgagacgtaatcaacgccgagtgcctgacaaaaggcgatggaagatggatcaccaccgacttccccacaaaccccaatcgataattcaggtttcgtttgccggcccttttgaatcgcgattcgcatcaacgcaccgacaccatcttggtctaatgtttggaatggatctttcgttagaattgcttgctcttgatacgctccaataaaatggccgatatcatcccgcgaaaaaccaaacgtcatctgggttaaatcgttggtcccgaaactaaagaaatcagctgaagccgcaatttgatccgcgactaaacaagcgcgtggcacttcaatcatcgtcccaatctgatacgcaatcgtttgagcttgttgcgctaggaaagtatcgattgttgcggttaattgttgtttcaacaactgcatttcagccgcagtgccgattaatggcagcataattttaggcgctaccgcgtgcccttgttcaacttggaccgccaatgcactttcgataatcgccaagacctgcatttgatagatttcaggataagtcactgcgagtcgactcccccgatgacccaacattggattgacttcgaccttcgccgcaatccggcgtttaatctccgccggactaatttgtagcaccgttgctaaagctacttggtcagccgtcgcttgtggcaggaattcatgtaacggtggatccaacaaccgaatcgtgcatggtcggtcttgtgccaattcaaaaatcgctttaaaatcggctaattggagttcttttaacgccgctaacgcgatttggcgattacttaattgatctgctagaatcatctcgcgcatcttgaaaagccgttctggtccgaaaaacatgtgctcagtccggactaatcccaaacctttagccccaaattcaaaggccgttgctacttccttcggggtttcagcgttggcccaaacatcaattggcgcctccgcatcacaccaatcgagaatcgtattcagagcggcttgttgcttgccagtttgttggcctaatgcgcctaaatagattcgaccagtgtgaccatcaaccgaaataatcgcgccttcttttaataactgaccattaaaatccgcttgtttctgatcagtatcgacactcagttgcgcacaaccaacgacacaacaacaacccatgccccgggcaacgactgctgcgtgggatgtcatgcccccacgactcgtgacaatcgcttgactgacgaccatcccgtcgatatcttccggtgaagtttcttgacgaaccagaataactttttcaccggcttcgtgcgccacttgtgcttgttgcgcatcaaaataaattgcaccagtcgccgcccctggactagcgggtaaccccgttaataacaatggtgcttgcttcagtgcttgcggatcaaataccggatgcaaaaggccttcaatcatcgctggttttaaccgcaagatggctgtttgacggtcaattaagccttcattgactaaatctagtgcaatcttaaaagccgcttggggcgttcgtttgccaattcgggtttgcaatacatacaaatgcccggcttcaatcgtaaattccatatcttgcatatcttgataatgacgttcaagttgattcgccaatgttttgaattgctcgtaaatcgttggtaattgcgcttttagcgtggcaatcggttctggcgttcgaatgcccgcgaccacgtcttcgccttgcgcatttaacagatattcaccaaacaaacctggttcacccgttgcggggttccgggtaaacgccacacccgtgccactttgcccctgataattaccgaaaaccatttgctgaatattaacggccgtacccatcgccgcatcaatttggtgtaaccgccgataagttttggcccttggatttaaccatgatttaaagaccgcttcgaccgccagatttaactgtgccgttaccgattgtggaaattgcgcatcatctgcgttctgatagagcgtttgataagtttgaatcaattgttttaaatcggccagtgtcaaatcagtatcactggcaacctgtttggcgcgttttaaagccgtcaattcggcttcaaaaattgatttatcaattccgtaaaccacatcgccgaacatttgaattaatcgccggtaacagtcatatgcaaaccacggattatgcgtttgcttcgcaagaccttccacagtttggtcgttgagccctaagttcaaaacggtatccatcatccctggcatcgaaatcggtgccccactccgaaccgaaactagtaagggttgttctggattacccaattgacggtgcgttgttgcttctaattgttgaaccgctttcattaagtcgtcttttaaaaagtcacattctgcttgaccatttgtcaaataacgttggcaagccgccgtcgtaatcgtaaagccggctggtacgggtaaacctaagcgcgtcatctcggctagatttgcccctttgccgcctaattcagtattggttaatgtttgatcttcagcaaaagcataaatatattgcattgtgatagcctccaatattttattgaacaccaacagcatatagtgtgacacattaaaagtcaatagtatgtcacattaaattaaataagccacactattatccgattttgattgcaaataggttgtcgctattttataatagtcttattgaaatcggtttaatcaaaggagtcattatggaattatcagcgcgtcaaaagcaaattattcaaatcgtccaaaacgatcaaccgattagtggcactaaaattgccggacaacttaatttatcgcgcgcgactttgcgtaacgacctcgcgatcttaacgatgactggcattcttgatgcacgtccgaaagttggttatttttacgtcggtcaagaggtcgccccattactcgccgatcatctgtatcaggcaacggtcgatcaattgatgatccccccgttattgattcaacaagcgacgaccattgatgaagccgtcacgcaacttttcatgcacgatgtcggttctttatacgttgttgaccaacagcagaaattattgggcgttctctcgcgtaaagatctgctacgcgcaacgattaacgccactaataccagcacgaccccggtggccatgattatgacccgcatgcccaacatcgtcacgatgactgaacacaaaacgattctacaagccggccaacgattaatcgcccaccaagtcgattcgctaccgattgtcgaaccggacggcgtgaccgtgattggtaagatcacaaaatcaatcattatgcgctactttatcgaagaaggattacacattcaaaactaagcttgcttggaggttttcaaaatgtcagcgattccaatttttatgatttcagattcaatcggcgaaactgctcgctctgtcgtgtcagccgtcgccgctcaatttccccaatcagttcctctaaaaatccaacgcttcccattcgtcaccgatcaatcaacattggtgccgattctaaaagacgcccaacaggaacaggccattattgtcacgactttagtcaatcggctcttacaacaatcggttaccgaattctgccaagcgcacaatttaaccctcatcgacctattatcatccctaacgaccgcgattagtgaccggagccaaaccgattctttagaaacaccaggctccttacgtaaattagacgaacactatttccaccggattagcgccatggagtttgccgttcgttacgatgacggtaaagaaccacgaggcttattagaagccgatatcgttttattaggggtctccagaacgtctaaaaccccattgagtatgtacttggccaatcaaaattaccgggttgccaacttgcccttaattcccggcgtccccttacccaaggaactttttaaagtccccacgcataaaattatcggcctcacgatgccactccaaacactactcaaaattcgcaccgaacgccttgcgacccttggcctaccccagacgaccaattattccgccgccaccagcgttagcgatgaacttgcttatgcacaacaactctttgatacgttaggggcaaccgtcatcaacgtggctgatcgttcaatcgaagaaaccgctagcctgattcaaaccatgatttaatgtttaatcaagttcttaaccttttctgaagaaaaaatgcatttattattcataaaacgacaatactttggtaatagttagtcgctatactgaacttatcatcaagaaggagcgattgactatgttagtacaaacgcaaaatattgaatccgttaaaatcaaaagcattgaaagccatgataaagtttgggccacgactgaaaacggccaagtgattgaattacatattaccgaacaacaaaaaaccgaccgtcttttctgggaatcgttaatcaacatcctccgggctgaattatggttaccacttcaaaaaagaacccacgaactcttacaaaatgactggctgacgagtgaaccaacgttggcttaaaaataaacaagctgtgacagaactcggttattgattgagtgcccacacccacggtttgattctgagcattagcctagttttgtgaataagtccgggttatggacttgtttgcgaaacgtcgctaagcacaggaatcagtgggtgttggcacgttatcaattgagtaccaagttgaaaaatccgattatcctgaatttagggataatcggattttttgatttgaacggaaattgatgagttctggcgcgcgtcgacgaagaatattcatttaaaatcagaatacttatgtcaaacacccttttcattttctaacgttccccttgccactccgctaaatactccgtcacaaaatcttgcatgacttgggttcttttcgttgccagtgctttagcgactggcgtattcatggtcgccgccaacttaaataacttttcataaaaatgattaatgactgtcgtcggttcccggtagttggtggcggttaattcggcccgcggttcaatctgcggatcataagccacccccgaatgtgcaccaccgtacataaaggtccgaccaataccaatcgcaccaattgcgtctaaccggtccgcgtcttggacaatttgcccttcgagcgataatacttgttgttggtcgatatttttaacaaacgacatatgctcgataatcgtcagaatcgcttgctgccgcgtaactgatacaccaatgacggttaactgcgccaccatcgcttggcgggcttgttcaacatcagcgaccactttttcatcaatcacatcgtgtaacagcgccgccatttcaaccaacgtcccatccgctgttggaatttgttggcagattaaacgtgcattgcggaccacccgctgaatgtgatcaaaaccatgcccactgtgttcagtcgctaactgcactttaacgtatttttcaatctgttcaatttgattcattatttcaccttatcactatttttttactaaaatgaaagctatcttaaccagtatatgctattctctaaataaacaataggagattaaagccaatgactaaaactaatttacaaataattgaagccttcttgaattccaaaaaatatgaccgcttaacgcctaatcaacaaaaatttgcggctgcgattctagatcggtttaaccacttttacgaaatcgataacccaaaattactggttaaattgacacctactcgactgaaaaagctgatgctcagtgaattcagtaatagtctcgtcttagataataaacaagtcatcgcccaagcacccgtattacgcgcttttattgcctatctcgctaaagaaaatctaattcaagccgataaagccactctgttaaccacaacccttgaaaaaaacgcccaatcaatgcgttataatcgtatttcaactcatgatttttctgcattcggggaacctatccagaaactattaaactttcaacaaaactggtccgatgaatttttaaaatcagaatcagctatggcacttgatactgatgacccgaacgcctactttgcattgatgaatgattttatactcgatatgttcaaagaatatgaagtattacctgaagattggaccggtaaccaggtggccaatctacttgagaaaattgagtcgagagaaggtgccctccctttcttgcatgatggcctttgtcttttcattgaattcatgttcactgccaagtatatttccgacgaacaaactaatgatatttttgaattaatcgcaaccgatgtttttaaacaatcaatggatgatttacctctgactccgttaatcatggaaatgcacttcgcggatgtcgatttagatgacccccaatcaataatcgactatcttcaaaagcgacttcagacaccaccagatgacactaaaataattgattttaattcacacaaaaaataaatcgttagaaggcggttcatttgacaacgcaggccagaaccatcaagatactgctactaaacaccatcattcaattgagtatcctagtcgccggacaaggccatcttagttcgcgactgccaatgcacgttgactttaatggtcaaattacgacaacaatcgctaatcaagcccacccgtttctccatagtgccgctttgttagtgatgtttgcgttagtcgccatctttttaatcttgacgagcacagccattcaatccagattcaatacgatgctgctgaacatcaatgccttaatcagtcgtctctgccaactaacagcggtttttatcaccattatggcctggattttcttagccatcatgctgtcaggtcacgttcaattatggttgatgctgacgaattatttgtacgtattggggctaataataattgtgggtagttggctttatcacctcatgcagattaatcattcttcaaaataatcaacctaaaaaaccggttaatctgaatcagattaaccggtttttacgttatattatttagttgattcaccaggttcagaggcaataatttgcatattcccacgtaaatcccaagctttaatcgcaaatggtaaaacaaaatgcatgtttttatgaattggataaacttgaccgtcaaccactaattcgccagcgccgtcaacaacggagactaacgtataaggtgcgttcgtccgatcaaaatgcaattgatctttgaccaaccattgataaacactgaaaaatggtgacattggtggttgcacgtaagtcgtaatcgttgaagccccgacttgtttggtttgaatgtttaattttggatcgtgatgcggcaccgttgtcgtatcaattgattgttgtaaatgtaattcacgtttttcacccgttttagcatcaacccgatcataatcgtataaacgataagtcgtatcactgctttgttgggtttctagggccatgatgcccttatttaacgcgtgaattgtgccgcttgggacgtagaagaaatcaccagtcttaaccggtaccttccgcaataattggtcccattgaccttgatgaatcatatcggccaattcggcttccgttttagcgtaatgcccatagattaaatacgcaccgggttcagcatctagaatataccaacattcagtcttgccgagttcagttgggccttcgtgtgcggccgcgtatgcgtcgtccggatgaacttgaacggataagctggcttcagcatccaaaatcttggtcaataatgggaaaacttcacccttggcattgccgaaataatcgcgatgttgcgcccaagcttgatccaatgttagcccttttaatggcccgttttcaatcgtactagggccgtgcggatgggctgaaattgcccaacattcaccgatatcaccggcgggtaattcataatcgaattcttcggcaagcttgcgtccaccccaaattttttcttgaaagactggttttagaaataatggttctgtcaattcaatcactcctaatgcacttttattatcaatgggttctattttaccacaaatgaaagcggataagcagataatttgtgaccgctttaatgattctcctgtaaaaattgttggacaatttggtcgcgccgttccagaaaggctggattatcggccgttggatgaatacgattggttaagaccaccatccctgtttgacgcgcacgatccagtaacatgaacgtcccggtaaaaccagtatggtaaatcagcgggtgttggttccggacatcaaagcgtaaattccaacctaacgaccggtgcagatgggccggtgtccaatcccgatataacgcttgaacactgccctgagtaatgggtgcgtgttcaactgttaattggccgagttggaattgggcgaagcggacgacgtcttttaacggtgcaaataagcccgctgccccactatgattctggagcgtataacttttaggatcatgaacaaccccctgtatcaagccccgttcagccgttaattcagtcggtacggccagttggcgatcaggtgcaaacgtactgtcgttgaggccaagcggtgttaaaatttgttcctgaatcaaatcttgaatcggcttttgacaaatcgcttcaatcatccaaccgagatacaatagaccgatgtcggtataaacgaccttcttctcaaaattcgggccgaccgtcagttgcgtcaacaacgcctgtttcaactccttggcggttaactgattccgattgggaatgtagccctctaagccggatgtgtgggttaataaatgtaagaccgttactcggcgatccttgaaggctggtaaaattcggcaaactttcgtgttgagcgccaattggctatgttccaataaccgtaacgtcaatgtcgtcgtcccaatcactttggttaatgacgctaaatcgtatagttgatccggtagtagtggtttcgtgaccggcaccttttgggcatcccccacgactgtctgttgacaatcgaggccgtcgattaacgcgtacgagacgccggggacaatttgatccgttactaaagcgtcgatttgagcggctgtttgattaaagcgcattggctcaccttcttttctgattactgttagtatcacgcaaagcttcaaaatgtgcaaataaaaaaacagcgttgcgttgccgcgcggctgttttccttaaaaattagattttaacattacctgagaactgactgttatagagatcagcatagaacccattttgacccatcaaatcatcatgtgtcccggtttccataatcgaaccgtgattcatcacgataatgttgtcggcatcgcgaatcgttgataaacgatgggcgactacgaaacttgtccggttggccaaaaggcgttccatggcgtgttgaatgtgaatttcagtccgtgtatcgacggaactagtggcttcatccaaaattaaaatttcaggatcagccacaaacgcccgcgcaatcgtcaataattgacgttgaccttgtgagatatttgatgcttcttcgttcaagattgtttgataaccatctggtaattgacggacaaaactatcgacatgggccgcttcagcagcggctaaaatcgcttcgtctgacgccgtttcattaccatacttcaagttatcccaaatcgtccccgtgaataaccaagtatcttgtaagaccatcgcaaagtgactgcgtaattcatcgcgactcatatcgcgcgtatcgacgccgtctaacttaattgaaccgccactaacgtcgtagaagcgttctaacaagttaataatcgttgttttaccagcaccagttgggccgacaatcgcgatcatttgacccggtttgacttttaagttgtaatcttgcatcaagatttctttgccttgataaccgaattcaacgtgttctaattctaatttattcacatcatcttgaacagctggtacaccggatggttcgtccgtcatatcggcttcatctaagacttcaaaaacccgttcagctgaagcgattgtggattgaatcgtgttggctaaattggctaattgagaaatcggttgggagaattgttgcgtatattgcatgaacgcttgcatatcccctaacgtgacttgaccgttggaaacgcgaatcccaccgataatggcgacaaagacgtaacctaagttattgacaaacgtcatcgctggcatgataatcccagaaataaactgggctttccaagcggctttatagagttgttcattttgttcttcaaacatatcaatcgtaacttgttcgcgattaaacgttttcaacacgacttggcctgagaaattttcttcaatttggttattcaatagacccaaactcttttgttgcgcggcaaagaatttttgcgatttaggggcaataatgccgacaacgattaaactaaacggaatcgtcaccaaggcaatcaaggttaattgccaactaatcgtcaacatcatccataagacgccgacaaacgtcaccgcactcgtgaccatttgggttaaactttgttgtaacgtactagcaatattatccatatcgttaatcgcgcgactcataatatccccgtttgaatgggtatcgtaatagttgattggcacccgttgcattttatcttttaattctttacgtaattcatagaccgtttgttgtgaaatccgggtcatgatgaattgttgtaagaaactgaaaagcgctgaagcgaggtacatcagaatgacggtcatgataatttgtttaatcttatcaaaatcgattgggagttgatccattgaaatgccagctttttgcatggcactccctttcatgacccctttaaaaatttcagtcgttgcttcccctaaaactttaggcgttctaatttggaaaacaactgagatgattgctaaggctaaaacaatcactaagccgatcactcgactcgacatgtaagttaataaacgtttcgttgtgccccagaaattcttaggcttttcaacgagcccgcccggaccgtgtccacctggaccacgaccaccgggccgcattggttgttgtttagctgccattagtcttcatctccttctctgatttgtgaattaataatttcttgataagtcgtgttagtgacttttaattcagtatgtgaacccttaccgaccatttgaccttcatccaagacgataatcgtatccgcgtctgccacagttgaaacccgttgaccgacaattacaacgacactctttttgatttctggatcttgtttaagggcttttcgtaaattagcatctgttttaaaatctaaggctgagaaggaatcatcaaagacatagatggacgcgcgtttaactaatgcacgcgcaatcgctaaacgttgacgttgcccaccggagaagttacccccaccttgttcaacgtaactgtctaaaccatccggtaattcactgacaaaatcgtcagattgggcaatttttaaagcgtgccaaatctgatcatcagtggcgtctggattgccgtattgcatattttcccgaatcgtcccggtaaataaattcgctttttgaggtacgaaagcgacttgttgatgaatatcatgcaacgtaacgtctttgacgtttaagccatcaaccaccacatcacctgattcaacatcgtaaaaacgcggaatcaaattgaccaacgtcgttttaccagaacccgtcccaccaatcacggcgaccgtttgaccggccgtcattttgaaatcaatcttttccagagctaaatgttccgcattttgataacggaaattcacttgattaaaggctaaattagcgggttcatccttaaaatcagccggttggtctggattaacaatgggtgtttctaaatctaagacttcgttaatccggactgctgaagcttgcgcccgtggaatgaaaacaaagaccattgataacatcatgaaactcatcaaaatttgcatcgcgtaagtcatgaacgctaatagattcccaacttgcatcgcttggttggcgatcaagtgaccacccatccaagtgatggcgatgttggtgccgctcatgattaacgtcataatcggtgccatgacggccataatactgtaaaccttcttggcattatgcgtgtaatcatcattggcatcgtcgaaccggtcttgttcaaatcgatcacgccggaaagcccggattacccgcacacccgttaaaccttctcggaacactaagttaattcgatcggttttttcttgcatcgctttaaaaagcggtacggcaaaatacatcacaatcccgatgaacaacgccatgattggtaaaaccacgacgaaaatcgaggttaactgcgcatctttttgatacgctaggaaactagccccgattaacataatcggtgccataatcatcattcgcaagaacatcatggccacgttttgaatttggaccacatcattggttgtccgcgtaatcaacgaagaggtcccaacttgatccatttcatcgtgtgagaaattaatgactttgcgataaatatcagaacgtaatttttgacccagactttgagacgtcttagcggctaaaaaaacattcgcaatcgctgcaatgatactgactaatgaatatcccaacattttaaaaccggtctgccaaatataatcaatatcccctttagcaatcccgttattgacaatatctgatgttaaattgggtagatacaggttactgacgacttgaataatcatgaagattatcgcgcctagcaccgcccaagtggacatgcgactctttgcaagtttaatcatgcgtactacgccttcttcctgttatttccgtgcactggcaccattttcaagccaatcaaccactagattaaagcggtgttcaacttgttcaatggtcagtgcttgttccgtatcttggtgcatgtaatatgaagcaatgccttgaaaaacattattcattaattgatggaatagaatctccaattcttcagactgatcacgatcaaactttaataagctgtaatcaatgtgctcaaccaaaaaggtgagtccttctgaatgatgactatgtttcaattctggcgacatttttcgccgatctttataatcggtatgcaaaaataaatgcttataaaaaggcgcatcttccccattaataatttcttcggccatcgctttaaagaaaatccgcatcgccgcaaataaatccccatcggcccttaaaatggccgtcttcaagtcttctttagaactatcccgcattttattcagatcataaaagaaaatatctgccttatcttcaaaatactgataaaaactcccccgcggaatcccggccgccttaataatattgctgaccgaggcttcgttaaacggtacgcgcgaaaattcagcgtgcgctgcaactaataagcgttgttgtttttctactggtaaccgaaaaaatgtctttttgggcattaaaatgctcctttctagcgttaatgacaactcgtcacttttatgacgctttgtcattgtattacatttttaatgaattagcaagccttggtcatcgccggtttaacgcgatttcaactgacaccgctatcatctaacgaacgacttttaatcacaccgcttacattgcttttgaccccgcgactatctcgctgtagaattggttaaatagcaaagctttctaaaattaactaaaggatctgatgttttgaccaatcaatctttaaaaccgatgctcaactcgactgaattaattgcgcacatgcgcagtaaagggattaccttcgaggccatctcgcaaaacgaagccacgacgattctcaataaagttaactattatttcaaagtgacggcttatcgcagtaatttctcgaaaaatacggcgggccaatacgaaagcctggattttgcctacctaattgatttggcgtcaatcgatatgcaactacgtgactacctcctaaacctctcattagacatcgaacacggtttaaaagtcatgttgttaaatctgattgcgaattatccagctgaagatggttaccagattgtccaagattttaaagtggatcatcaatcggcctacgatcaaacgttaacgtatctccgcaaaaatcgctattcgcaagatttgtatacgaaacaccgcgaccacctcgccatctggacttttttagaaatcgcaacctttggcactctatcgatgtttgtcgatttctatttagaacgcacccaaactaaatctgttcggaaagtccatacctatttaaaatatagcaaaaacattcgcaacgcttgtgctcacagtaatccgttattaattaatcttttctctgaaaaagaattcttacggcacccctcgagcgccgttcaattggctgcacatcaaatggcaatccccattaaccgcctatcggatttaaaaatcaacgatctcgtctccttattttatcttcaccaattattacaaagccccaaaatgagccgccatcgttaccaagaaggcctcgatttaatcaatcgctaccaccgccatgaggattggtacgctcacaatttaaaactaaccacatttttcaacctttttgggcaactggttgaatacctaacggttaaagcgtaaactagacattaaggaaataacggttcgaccgttagctggccaaggtactgccaaacgctagttattgcacagaaagaggcacccaatcttaattttaagaattgggtgcctcttttttgactatcatttaaagcaataaaaaaaccccgctaggcggggtctaaaagtcttatagtttaacaatgtttgttgcttgaggaccgcggtcgctgtcttctacatcatatgaaactgcttggccttcatctaatgatttgtagccttcgccttggatagctgagaaatgagcaaatacgtctttgccgtcttcaccagtgataaaaccaaaacctttgtctgcattaaaccattttactgtaccgttgttcatgttgtttcctcctgttacatatcaaagtatgtatatttattattgtcgcaaaaaattattaataggtaacagaggaatgattattcaaaactcaaattacgtctcaaaattgtttacttgattagtatagcatatgattttcggaatggcaatctttctcaaaacttttttaaattattttttcgaggaatctctcggttctattccgatagaatatgctatgatgactattatacggaggtgttgccaatgatgcaactcaaacggctattcgggttgttcggtttgattctattacaacaactacccctactaattgtcggaatttttgtcaccttacctaaagctaatcgcaccccgcagctcgtgacatcagtcggttggttgtttctcggtttaacaatcctgattacttggttcatgtggcgtcgctatcaagccattaaggacccgcgctacgcgaccgggatgaccactcaaaaatggtggacagtcttaatcgcatttgtggccatgatcctgattaataatctgacggtcccgtttattcaacccactggtaacggtaatgtcgaagcgctgaccgacttactccagacacttggcctctatatgattccctacatcgtctttctaggcccgattatggaagaactattattccgcggcttcttaatgaattggttttttaccaaacgacccgtgttcagcatacttagtagcgcccttttatttggactgatgcacgggataaccgatcctatttattttttatcaaaagctttattaggcctcgtcctagcgattgtctatgtgcgcaaccaaaatattaaaagtacgattaccttgcacattcttaataatttaacggccggctttactattttttaaattcagaaaggaattgattaaatgtctgctttaaccacgattctaacttatattcaagaccatccggaccaagtgacggttgaacccttccaatatgcgaacgtcattcgctttggcatcaacgatcaaactgacttaccggaagttgaaaaactatttcctgaaatgcgactacacgttaaccgcatcgatcccgattacgtccaaagtcattatgacctactcgattctttttaccgtcaaacggaagagaaacaaaaagacggcttcgaagatgtttggattacaacctcccatctcagcgaccgtcaactctttttagtggatctttcttttgaataacccgcaattcaaccaagttaaaattagtttattaaaaacattgattctaacgctctttctaatgacgatgcgttggttaattccacacccaatcatcattatcgccagctgggtcagcgcttttgtttgtttaatctactttggcattctagtctggctctaccattatcggtaattacgccattttcttagtttcaacaatcacttcttcagtgaagtagacttgtaacccgaaaaagatagttaacatggccgcagcaatccaggccgtgcgcacgttgaaaaatttaacgaacaaacctgaactaatcgtcccaacaaagaagctaccaacaatcagtccaaaatactgggctttttgttggtattttttttgcttagtttcaaaatacaaataagtgttctcaactaattttttataattaccggttgtaaacgtattggcatagggataaccattgaccgtcgcgtagcttgaatattgaatggccatcgacatcgctaagatggtcgtcaccaacatatttggcacactcgtgggtaaaaagccaacgaccactaacgcgataatttgaatcgccaacagccatagtcgccaaacattcaacccattcatgttaaaatgccgtttcgcaatttggacaatgatcgtcccaatcgcaaacgcaataatcggtgaaatcttctccggtagttgtgaccattgactcgtcgcaacatctaacccaataaaaacaatattaccagtctgggcactcgcaaaaaccccaccgcgtaagatgacacagtaggcgtctaaaaagccaccaataaaggttaaaaaaaccgccgtgcctaatcgatcatgaaaataaatttctttttgcaaaatcagccctccgaatcaatacttccattatacgcaaaaatcaacagaattcaaaaacgccatcaacaattttgatggcgtctcttgaaattataaattaatcggtgtatcaatttggtcgtgaacgattgttcggaaatctaataaaccggtatcgagtccccgtaataagacttccgcggtgccgatattggtcgccaatgggacttcgtaaacatccgacaaccgaattaacgcgttaacgtctggttcgtgcggttgggccgctaatggatctcgcaagaaaatgacgagatcaattttattttcggaaattaacgcgccaatctgttgatcgccaccaagtggccccgatttaaaccgtttaacggataaaccagtcgcttcaataattttttgcccggttgtcccggtcgcaaacaattcatgttgcgctaagattggttggtacgctgtgactaatttgatcattaatggcttttgacgatcatgggcaattaatgcaattttcattctaacgcctccctatcatttcattcgtaaggctcagcaattgattctctctatattattcagtgtacactttctctcaatcgttgccaattaaaaaagtcagtccctcaaaatgaagggctgactttgaaaagtcggtattctttaagcttaataccaaccgttgcttaaccagaagctcttagctgcgtcccatgaaccgtaacggctcgtcacgtattgatcagcgactttttcttgattggcagctgaatagtcaccatttaaatatgacgctgataattggtaacgaccgattaattgaccgttagtggctgtatatgaaccaccggattccttttgcgcaatccattctttagatgagctcgtggttgcggcagtagcggttgtcgttgttgaggcttgcgttgtggcagctggtgtcaccgttgcggcttgaactggtgtcgctgtttgtgtcgttgcgaccggtgttgttgtttgggcaactggcgcttgagttgtcgtagcggctgcttgagtcgtagttgaggccgttgtatccgcatcaatcgttagttgttcgccaacgtagattaagttgatatttgagatactgttgttcttagcgattgaatcaactaagtcgttgttaccagcgaatttatttgagattgatgataaggtatcaccagttgtaacagtgtaagttgtggctgcacttgcttgaccgttgcctgcgaagaggatgccagcagctgttgcggccgttaatgtggtactaaataagattgtttttaaaggtgtcatgtatgattgatctccttgaatttaagttttgtgtttcaacgtgtgactaatataccatctaaattcccgttgtaaatatcaaacaagtaacaattgatgacaaaatggtaacagtttaacggcaaatcccgatcaagctgtaatgaacaccgctttattgcccgtccttaaccactttaccaatcaataaataacgtcctattattttaagcaaaaaaataaacgctcttaaaatgaattaagagcgctctgtaataactttgggggagatattacttttatagtttatcgcacgttaacaaattgcgcaatagcgataataaaataacattgtacgttatactattcacttactcaactgattataatcctcatcagaaacggcttccaaccattctggtgtgccggtcgtaatcgccacgtgtgaaaaccaactatctttagttgccccgtgccaatgcttaaccccatcatgtgtgacaatcaccattcccggtgtcaataattgcgccggctgtcccgcttcttgataccaaccttgcccacccgtgactaataaaatttgatagccagcatgatgaatatgccaatgattccgacagccaggttcaaacgtgacgttgcccacaccaacattgattgctggatcattcaccaacccttgtaaataactttgccccgtaaaaaaggctgcatacgcgtcatttttgggacccatttcaaaaataccattttgcactgtttcttgattagtcatctgattaccatccttcatttagttttaatgtgcttctttaaacttgttttgttgggtagattgtaaattcattaacgttgacgtcttctggttgatcgattgcaaaattaacgacccgcgcaaccgcatccggtgtgattccgaccgccgcgtaaaagtccgtcatattttgtttagcggtttgatcggtaatcgtcgtcaataattccgtattgatggccgccgggtataaactaaccgtccgaatattagtcccttcctcggcgctctccatccgaatcacttccattagattccggacagcaaacttagtggcaccatagacaccagcgccggaaaaacttttgatcccggcaactgacgacgttgtaataatctgaccactcttttgagcagtgaattccggcataatcgcagcgaccccattcaacacaccggttaaattaatgtcgatcatctgttgccattctgtcgtatgcaacgcactaatcggtgacgttggcataatccccgcattattaaataacacatcgacccggccaaattcagttttagccaacgctactaaggcctgcaaatcagctgccttagtcacatcagttacccgatagacggcttggccccccgcagcttcaatagtgtcaaccacagcttgtaaccgatccgcccgccgagcacccaatacgactctagcaccattggcggccaacaattgggcactagccgcgccaatccctgaagaagcgcccgtaataataatcactttatctttaattgtcatttgaaaaactcccttgcttttaactacaatcgctagattacaccctcgagtgcactataaggcaagcttcttttcaaaataaaaaacgactttcccaaataaattgaaaaagtcgcttgattaagctatttatttttaaagcgttcagtcagcttgtgttcactatactggcttaattcactcggttcaatttgatatttcgaacagataattaataactgatcgaaacagtccgctaattcttcttttaaattatcgtatttggcatccgtcgattgaaccacttcgcccggatggtcccgccctaactcgattgtccgaatcgcgcgtgataattcaccaacttcttcagataagaaattcagccgaatcagcggtgaatattgataccaatcacgctgtgtataaaattgcgtcaaccacgcttgatgtgtttctaaatgattagccatcgaattcactccataaaaaaagcctaccgcagtagactcctcgaatttagttgggtatatagggatcgaacctataaattacggattcagagtccggtgccttaccagtttggcgaatacccaatgttatttatcacggatactatgataccgctgattggaacccttgtcaattctattttttaacaaaatcgccaaaaaggactatactatagaaggaggcggttaaatgatggataaaacagcaatcgagaaattgtttcaaggtaaagtattatcgcatgaccagcaatccgttttaattgaattagctgattcccgcaaagaattatcaatctcaatcgaagaagatgtcctggcgttaattgaaaaacatcaagattatgcactcaatatcattaagaacctaaagaaaaagtcgaatcagaaaattactaaagaacacattaatattaatcatcgtaattataaaatatttatctaagcatcagtttgtcttaattaaagattgacagcgcaagctttattcgataatatattaattgttacaaaaccttgcccgttggtcaaattggttaagacgtcgccctctcaaggcggagttacgggttcgatccccgtacgggtgatatttaaaacatcccagaagatagaaaagctgttaaactaaggtttaacggcttttttgttgccttaattttgatttccacaactaattcagcttttttataccaaaatacatatttcgctaactttaaatcgttttatctattgtttcgttatataattaacttattaaagttcttttaattgatgatactaaatttcataatttatgtaaaaattattcttagtccaactactaatcacgctactccatttgaaataagaaaaattctgagttcagatatagatcttatacacgcgattaataactagtaaattactatttttgattaacataaaatttgtccaaatactgatgactttaaaagctgactgccttggaggagttattcatggaacctaaagatatgtctgaagatcctaagcagcttttaaaagaagctaaacaaaaattaaagcagagtattactcaaaaaaaggtgttgcaatttacatcatctaaaaaaattgttggcgttgatttttggaataccatttcaaaattagacaccggtgatgttgtcttcaccttaaatgaacccacccactttagattaaccgaagttgaatttgatggcccaacatatcgtgaagagagccatgaagatggcaaaaaagtaactaagaaaaaacggcatggcttagctggtgctgcaatcggtactgtcttaatgcctggcgtcggtacgattgctggtgcaatggtgggcaacaagaatggtaaagataagggtacgtcatcttcacacacaacaaccactcagattgaagaagcaactaatatccgtctaatccttgaaaataccgatacacatgaatcggcaatcgtcggggttcttgggaaacaaaccgattatcaagaattacttaattttaaggctcctgcagcaatcattgctgacacccctactcaagaaacaccggttacccctgaaactgctaatgactcaacttctttaagcgatgaaattgcagagcttcgcaaacttaaagaactagtcgatgaaggtattctgactcaagaagaattcgatgctaagaagaaattggtgcttggtatttaatcttatatattggaggaattaaacatgcttttcgaaataagcctcgatggtataaagacttcctatgaaaaaaaagctcgaactactcgagataagggtaaaagtatcatatcccttccccaaaattttacattgattgatattgagacaacaggtttagatccaaagtttgatgacattatcgaaataggagccatcaaagtagtcaataatcaacctgttaattctatgagtaccttagttctcccagatagttacgaaatggaatatgagctacctatttttattgaaaatcttactggaattacgacaaatgaattacgaacaaacgggagttctacaaaatcagcaatccggcaactgttagattttgttggagatgacactcttatgggctataacgtatcttttgatatcaattttatttatgatactgaactcaatatattaaatcagaaatttgaaaataattatattgatattatgcgttttagtaaaaaactattacctgatatgaagcactatcgagtcaaggatatgcttgaaattttcaatattgaatccccccagcaacatcgtgctttaaatgattgtagacaagaattagaaatctttaatattttaaaaaatatgattaccgaccaagatgattttattaaatcgtttacgccatgttctcgcactcattctaccaaactaaacgccaaggatattcatacatctaaaactacttttgatgatagtaatccattttttaatcaatacgttgcttttactggcggtgggtaattaattttgaaaaaaatgtcaattttacaaaaagtcttagatacaggggtcgtcgcagtcgttcgtggcgcttctaaggaagaagcttttaaagcagccgaagcttgtatcgaaggtggcgtcaaagggattgaattaacattcacagccccacaagccgaccaaattatcgctgaattaaaggcccaatatcaagacgacgctggcgtttgtatcggtgctggaacggttctcgaaccaacgaccgcccgcattgccatcatggccggtgctgaatttatcgtcagcccttcctttaataaagaagttgctttactatgtaatctctatcaaattccatacatgcctggttgtatgacgattactgaaatccaaacagctatgacttacggttcagaaattgttaaagtcttccccggcagtgttgttggtcaaggcttcatctcagccgttaaagcgcccttcccacaagttaacatcatgccaactggcggtgtcaaccttgaaaacatgtctgattggttcgataaaggcgttgtcgttgtcggtgccggtggcaacttagtcggacccgctgaaaaaggtgatttcgcccaagtgaaagaaaatgcgaaagcttaccacgcaagattcgaagaaatcaaacagggattaaatcgttagagtaatataatctttttgagagtatggttagtaggtaataaaaagagccccttagtgggctcttttttatatactgtttaaagttgttgataacaatattggatttgataggttttgggctgattagcgggtagtgtgatatcgccaaaatcgggatgattcggagtgtctggcaaggtttgtggttctagcgcgataccttgataagggcgaccagcaccattttcaaatggtaaatcggcagtaaatgaattacccgtgaaaacgactaagccattgcgatttgatttaatcgtgatttgacgttgactagcttgatctgttaaaacggcaatcacattattttgatcagggtggactttgaaaatatcatccaatcctttttcaggcgttgtttgcaacgcatcaattgccgcttgtaaacatgggccgtcggtgaaatcaaatggcgtatttttaaccgcgtttaattggccagttgggattttttcagtgtcaaccgctaagtagtgttggctatttaaggtcaacgaatgattcaaaatttgatgagtatcacttaaattaaaataagcatggctcgttggattaaagacggtggtttgcgaactgttgccggtgaaggagatggtcacctgattgtggttgtcgagagtataaccaatggtggcggttaaatcacccggaaagccgtcatcagagctttgaatcaggcggttaaaatagacgctgacactatctgctctcgtttcagttgtatactcccaaataaactgatgaaagccgtgtggtccaccgtgaagcgtattttggccttcattttttggaactgtaacggattgattggctaaagggaattgaccattttttagacggccgccgatacgaccaattgccatacaaacgtagaatgggttgtttagataatcggctgagtgtgggaagtttagaaggagattcttggaaccagtgggtgtgggcaccaaaaattgctgccaagtcgcgccgagggttaagaatgtcgtgctgatgccattatcgttggttaacttaatttgatcgatgggctggtgttggtaagtatcaaaatgagtggtttggatatccatagtcggggcctccggtaatgttagtttttttaagaaactaaatcctaataacaacagtataaactgctggttaattaatgcaaccgttttctttagtgtgttaaaaaaacgaggctgtgccagtaatcttagtcttttgatattaagtgttgttcttcttcgatgcacgccagagcacatcaattaccgttcaaatttaaaaatgccaatctcaaaacttagggattggctatttttctgattgttttttagaggtttaagtgcaaatcataattagtaagaccgagcgcttgatgggtaaccattgcggcgccaccgtaaagtggtgcgtcttcaatcatcggtgacaattggatttcgggttgattgttgggagctagttcagcatagcgggtcttaatattgtcaattaagctgggaatttcaccgacgatgcgggattgtaaataaatgatatccgggctaaaactttgatctaggttgtgtaagataaaagcaattgcgttgatgaattcgagcatcaattggtgggcgtctgaatcatctgatcgataatattgcagaaatacgtcacgatccagatgtgcaattgctttaattgttttaaatcgattaaaaatcgcatcttcactgaatgactgttcaattggttggacgtgggttgtcttaggttcgggataaaagattgaacgaccaacttcaccggcttggccatgacgtccgcggtagagtttatgattaataataatgccggccccaatcccgttatggacgtctaaagcaataatattacgttcagtcggatggattaagtagtcactagccgcaattgcggctaaattagcttcgttctcaagcatgactggcacgccaaattcggcgagggcgtctgctaaattaatagaccccatgtcgataaagggggagtcaacaacttgattgtggtcaacaatcccgttaatggcgattgaaatgcctaataagccgtgggtcgctttcgggattgaaacttggtggatttgtattttcatcatctcaacaatcgcctcgattggttgatcaatcactggcgttgaagagaacgaaattttttcaccattaatccaattgaccatcattcttagatgatgatggcccaattcgaaattaattgagtagccgtagtggcgattaaatttaattaaaattggccgccgaccaccagcttctgagctcattccctgcccaatttcgctgatgtaaccttggttagaaagggttgtatacagggatgaaatcgtcgatttattgagttttaaatgattggcaatttcaatccgactggtttgtggccgattaaatagcatttgtaacattaattttaaatttaaatcgcgcattgcgtcctgattaattgatccagccatagtcgtgctccttaagaattaataatactgtaagcataccagaattagacgggaataagcagttttttttaatgggaaatagggtcgaaaaacggctcatatagaaataataatttaaattgataaaaaataaagaaaacccttgcaaaaaatcgagaaaggggttacattattaattgtaagttggttgtttcaaaaaactaatctaaaaaagagctaaggagattttagtgatgaaattatttaatcaagaaaaaatgacatatgtcggtaatcaatcaggtttgaaagctgggaatggttttcattattataatcctgatgaaatgatcaatggcaagaaaatgagtgactggttgaaattctctgttgcttactggcacacaatggatcaacgattagtcgatccatttggtgatggcactgcccaacgtccatgggataaatttgaagatccaatggaacaagcgttagctaaagttgattatttattcgaatttttagataaaatgggtgttgaatactttgcattccatgatcgggatttagcaccagaaggcaacactttacgtgaaaccaacgctaatttagacaaggtggttgaccacattgttgaaaagatgcaagaaacgggtaagaaggtcctttggaatacgtcaagcctctttactaacgcccgcttcgtagccggtggcgcaacggccccatttgctgatatttttgcttattcagccgctcaaatcaaacattcattggaaatcgctaaacgggttaactctgaatcatacgttttctggggtggtcgtgaaggttacgaatcactattaaacactgatatgaaattagaacaagatcacattgctaaattcttccatctcgctaaagattacgctaacgaaattggctatacgggtcaattcttattagaaccaaaaccaaaagaacccacatcacatcaatatgatacggatgcagcgacaacgatcgccttcttgaagacttacggtttggaaaaagatttcaaattgaacttggaagggaatcacgcttacttagccggtcatacttacgaacacgaagttcgcgtggctcgtgatgccggtttgttggggtcgttagacgctaatatgggtgataagttaatcggctgggatatcgatgaattccctaacgacatctatgaagcaacacttgtgatgtatgaaatgcttaaaaatggcggtctaccaactggtgggttgaactttgatgcgaaaccacgtcgtcaatcattctcaatggatgatctattcttagcgcatactgctgggatggacacttacgctgctggcttgaaagtggctagcaagttaatcgaagatcgcgtctttgacgaagtcatcgaagatcgttacagttcatttaagactggcattggtgctgattttgaagctggcaaagtaacctttaaggactttgaaaactacattatcgacaaaccacaatcagaattaattgcagcgactaaatcaggccatttagaacaactaaaagcgacattaaacaactacatctttaccgtattaggcaaataattgagatagaagagcaatggcaatcgtccggcgctcttttattttcgaaatcattatagaatggagtagacagatgggattagtattaggcgttgatttaggcacgagctcggttaaggtgtcagccgttaaccaacagggtgaaattgtggcccaacaagggtttgattatcaattatcacaacctaaacccggctatagcgaacaaaatccggaagactgggtgacttcaacgacggtcgcgattgaccgactgattttaaaagacggcatcaaggccaacgaaattgagggcattagttattcagggcaaatgcacggcttggtcttgttagatgataataatcaggttttacgaccagctattttgtggaatgatacgcggactacggcgcaatgcaaagaaattttgaatcagatgggccaatcttttattgatatcactcgcaatgtaccacttgaaggttttacgctacctaaaattttatgggtcaaagaaaatgaaccacaaatttttgcgaaggttaaaacaatcctcctaccaaaagactatttacgttaccggatgaccggcgatttagcgatggaatattccgacgccgccggtacggtggttttagatgaagaaaataaatgttggagtcaagcgattgcggatcaatttgatttgccaatcagtattttccctaaattaatggaatcaatcgatttggcggggacaatcagtgattcgtacgcgacgttctccgggttaaaaacgaccacgaaggtttttggtggggcagccgataacgccgctggtgcgattggtgccggaattttgtcatcgaacatggtgatgtcctcgattggtacctctggggtcgttttgaaatatgaggattcagccgatgttaattataatggcggccttcatttcttcaaccatgcgattccaaacaaatattatacgatgggggtcactttagcggccggctatagcctgtcatggtttaaaaagacgtttgcaccagaagccgactttaacgattttgtgacggctgcggccgaatccacggtcggtgctaacggtttgctgttcacaccgtacattgtcggcgaacggacaccttatcctgatggcgatattcgcggcagttttatcgggattgatggcacgcatacacaaaaagatttcacgcgcgcagttttagaagggattatcttctcgtttgcagatatcatggcaattttcgatgcgaagggcagtcattttgacaccgtggtttcaatcggcggtggggcgaagagcccggtttggttacaaattcaagccgatatctttaataaaaaagtcgtctcattagtcaacgaacaaggccccgggatgggtgccgcgatgattgctgcgaccggtgtgggttggtttgattccgttcaagatacggctaaggcgtttgtcagctatggcaaggaatacttaccaaatcctgaaaatgttcaaaaatatcaaatgttgcatacactctacaaaaaaatatacggccaaacggctgaaattagtcatggtttgatggcttatcggagagatcaattaaattaagatcaaaaaaggcgcctcaagtttaaatacttgaggcgtctttgggtgctactatttagcagctttagcagcgtattcagcgttacgtttcttcatttggaaagcataccagataaagatgagtaggtataatgctaaagcgccaagtgcgtaaagaataaatttaatatcgccttggctggcattaccaacaaggtaacctaagaatttttcgataggaccttccatcgtggtatgtgaaattaaagcattttgagaaatccctttagggaaagcaccgactgctttagcagtggcagtaacgaatggtgcggataatgtaccagcccaaaggaagattggtaactctaaggcaccgataataatcatccgaatgactttaccacgtgtaacgactaacaatgcaggtgtaacccccatagcgataatcccaccaagtggtaataatttgttgccaggtaagactaatgcttctaacaacataataggggctaaaacgttagcggctgcccaaacttcagcacgaccagcaataaatggccagtctaagccgacgtttaacttccgaccttttaatttgccattagcaaaattagtaattccttgagagagtggttcaacggcagcgatgaaccatgaaccgattaatgagaataattccaaacagaatgcggccgtaaatgatagcgtaaatatttctttaggaccttggccggatagtaaaccaataaagatccctaaataaatcccaatggcgaatttactaccccaaaagccaatttttttatttaacttagcggcatcaaaatcgtatttgtccaaccaaggaaacagtttatcaaaaatcttgtcaaaaaccatgatgacgggattcatcatataattcatatgagtggttgtcatgggatttgattctggtgcatttagcaagtcattaaaggttggtttcattaaatcagagttaatgatttttaagacgccaatgaagattactagtaatgttgcaattaataagttagcgccacagtagattgaaaagagaccaacaaaagctaaatgccaaatatcaaagatatcaacgtctaatgtattggttttcttcataacgagcatgatgatgttgacaatcaccataattaataagaaataaagggtgtatggtgagccccaagtaatggttgctaaaggtgcccatccaacatcggtggccgatagattaataccggttgatctgacaaaagcagttagagcatcctggaatgaagatgtgaggacgccgataaccgctccaatcgcagttaaagcaatggcgagtttgataccaccttctagggcttttgagaatttaaccttaaagataagagcaatcagcgttaaaacaatcatcatcatcggtgcagccccaagatcaataatgggttggaaaacggtattggcaaaatgaatgatagttgacataggtacatctccttaaattaataggacaacaggaatcgttacttcattgctttaatggcttcttcaacttgatcataaacgggttcagccatagcaggcatccggtatagaattgggccagcatcaatgaccgggattttaggatcaaagcctagatcggttgccgcgattggcgtaaaaatatcataatgagccatcatttcttctgtgatatctttaaccatgacagcatcagcggtgacttcataaccgcgattacccatttctgtttctaaagcgtctttaatttgatgacttgaattaacaccagcaccacaagctgctaaaattttaatcattataaattcctcctcgataattgtattaaaagttttgattcaaaaattgatagatttcatttggtgttgttaatttgaaaaagtgttctaattgatcagatggggtttgactaataaagtccataatttgagcaaggacgtttacttggccctctggatcatcatttaaaatcatgaataagaaatggacctctagggttgaagcaggtgcaatcatactgtggaaggttagtggattgataagtttaaccggaataatacgccgggttttgacaaattcacattcagtatgtggaatcgcaatgttaggataatgactagaaataacggataagtccattccggttgggtaatggatttcacgatcaatcaaattattaacaaaacttgcggttacaaggtttcgttgataaagtttttgcgcaatctctttgaaaacttcaacctgactagtcgctgtactcgtgtagattgtttctggttgaaataaagtagtcgtagaaagtttaggttgcatgttatcacctccatttctggttgcaaaagtttgataatgtttggtaatgtttacgaatcaaatagtaaacgctttcttggccgttgtcaaccacttgctaaaaatttaatttgttgatttttaagggattaagccaggtgaaatatcattgaaacaaatgggttactaggcgattatcaaaacaacggttaagtgtgcttgacttcactaaatttaaatgttaatttatgtttgaaacgaacattaacgaacaaaggggtgattggatgttaaaacgtgaacggcttgtcgcgatcttagagatggttaatactgcaggattggtaaccactactgaattaattgacgctttacaagtttctgacatgaccattcgtcgcgatttggatgaattaaataatagtggcaaattaattcgaattcatgggggtgcccaaagtattaaaggctcgacgttgtacgaaccgtcacatattgaaaagcgtgaaatgcatattgatgaaaaaagggccattgctaaattaggggcccaatttgtggcggaggaggagactgtttttatcgggtctggtacaacgcttgaattgttggcccaatcgattcaagttaaccaactgcgcgttgtgaccaatagtttgcccgtttttgaaagtattcaaacccgaaacgcgaattgggaattagttttaattggtgggacttatcgaaatcgttcgggggcctttattggtaacttagcgaattcgacactggaatcattaaagtttgataaagcctttattggggtcaatgggattcataacgaagccgtgatgaacgcaagtgcggaagaggggcggacccaagggattgcattaaataatgcgcaacaaaaaattattctggcggattcaagtaaattaaatcgggatgatttttaccaattctataatctatacgatatagacgtcttggtgactgaccagtcaatcactaatgaagaattagagcaatatgggcaatttactaaattagttaaataaaaaattggagtgatattgatgaaaattgcaatcgcgacagatcaagctggttttgatttaaaggaatatattaaagcctatttggaagaaaaatctttagaagtccttgatttaacaccaagtccagcggctgattttgttgattcatcagtgctggttagtgaagctgttttaaaagggtcggcagaccgtgggattatgtttgatcaatttggattaggttcggccatggcgagtaacaaaattcacggtatggtgacagcgaatgtcactgaagaaaacaccgcacacatgacgactgaacataatggggctaaagcaattgccatcggagcgggcttagtgggtcctaaattagccgaagcaatcgttgacgaatatctcagtgttgaatacgctggtgggcgccatcaaattcgtttagacatgttagagaaattaatctaagtttggaggatgaactaatgagaattgcaattggaaacgatcatattgtgacagcggtcaagatgcaaatttctgactttttaaaagcgaacggccatgaagtgattgatgttggcacgcacgacaatacacggacccattatccgatgtatgggttgatggtcgctgatttagtacgagatcaaaaagcggacttaggggtcgttttatgcggaacgggtgttggaatctcgactgctgctgataaaaataaaggggtccgcgcagctttagtggcggatccaatcgcggctaaatacgccaaagaacatttgaatgcgaatgtgattagttttgggggtgcggttgtgggtgaacatttagcggaggaaattgtacgcgctttcgtagatgctaaatatttagcgcaaccagcagatgctgaactgattgctaagattgatgctctagaaccagataatccagagcaacacgataacccgcactttttcgatcgtgaaaatgatttgtgggcgcaaggttattatcacgattaaaaggattgccatggtagctaatcaatcacgataagaagggtgaaaaaatgacaccaaataaaatcgcattattaaagaaaatgtcgaatgaagcaggcgtaatcgctgcgttagcaattgatcaacggggttctttgaaaaaaatgttagctgcagcggcgaagcaacccgcgaatgaagaggatattgttgcttttaaagaagcgatttcttcagagttaacaccgtatgcttcggctattttattggatccagaatacgggttaccagcagctaaggtccgagctgacggaacgggtctattagtcgcctacgaaaaaacgggttacgatgtcagtacacctgggcgcttacccgatttaatttcagaatggtcagtcaagcgattaaaggcggccggagcggattcaattaaattcttgttgtattacgatgtggatgaagcaaaagcaattaatgatcagaaacaagcctttgtcgagcggattggcgacgaatgtttggcagaagatttaccattcttttgtgagctggtgtcctatgatgcgaccaatgaggatgtcaaaggggtcgaatacgctaaagttaaaccacataaagtacttgaaatgatgacagaattttcaaaagcacaatacaatattgatgtcttgaaagtggaagtgccggttaatatggcctacgttgaagggttcaatgaagatcgtgaagtcgtctatacacaagcacaagcgatggctttatttaaagcccaaagtgacgcgacaacgttaccgtatatctttttaagtgcgggagtgaccgccgcattattccaagcaacacttgaattggcgcacgaagcagatgcacagtttaatggggtgctttgtggacgagcaacttggaaaaatggcattgaaccttttgccagtagtgaagcagcaggccgtcaatggttgcaaaccactggtaagcagaatattgaaacgttaaattcagttttaaatagaacggcaacatcttggtttagtaaagtgcaataaggacagttaattgtcactaaaaacggcaccttgataggtcaaaggcgtcgttttttagtgaagtaattgtttgagaaagggatgcgttggacatgacattagcggctttaaaacaaattaatccagattatcagattttaagcatcaatgatccgcgcttcgctcaatttggacttgtttattctcaatatgatttaactgaaattgaacaatggatgggccaaaatgtgcgggttgatccgcaagataatcaatatgtgccgagcaatccagcattagaatcattagcgatgattcagcaaattggtcgggatgtctttgcggggatgccgattgaagcgggtgaatgtacgggccagacaagcgacttttcagcgattgaataccatcaaggtagtgaggttaacgttatattgactgatgtcgtgatggtgttaggcaaacgggcttctttggaaaaaacgggtcaatttaacccacgacaagaaggactcctgttttatattccggcgggcaccgttgttgaattttatagcgatacgctacattacagtccaatcaaagtctggtcaacgggatttaagatgattgtaatgttactggcagggaccaaccaaccgttcgaacaatcgttaaacacgaccaaccagcgaatcgttaaacaaaataaatttcaattggttcatgcgtcgcggactgataaaattaaacaaggcattcaagtgggcgtcgttggtgaattgattcgactaaacccattaaaaatatagagattaagaggataagtaatatgttaaaaattgaatctgatcattttttggtcaccatcaatcctaaaggcgctgagttaacgcaaattacggataagaagaaagaactcgattatttgtggcaaggaacggcttggaaaagacacgcgcccattttatttccatcaattgggcgctcaaacgatgatcattatttgattgatcaaaaagaatggccaatgccccaacacggttttgcacgcgattacgattggacggttgttgaacaaaccgcgactgaaatcacgctaagttttgttggtaatcatgagacggcgacccttttcccctttaaatatacgttgcaggtcacttatgcgttaacggcgaccggtttaaattgtcactatgaagtgattaataatgatcaacaagcgattagttttgcgttgggcagtcatcctggctttaacgtgccattagtgccagatactaaatttgacgattattatttagattttggggaagcggctgaattagcgacgtatttaattgatccagcaccattcagatccggccaacgggggcgtctagcacttgaagcgggccaactcgcgttgaatcatcggttgtttgataatggtttgattttatttgatcgccctagtacaactgtgacgcttagaaatcggaagacgaccgatagtatcagtttaaaaacagctgattttccttacatggccttatggacgttggaaaatcagactgaggatttcttatgtattgaaccgtttgccggtttgccagatcaatatgggcaacaacaagcgattaataccaaattaggcaatcagacggttgaagtcggtcagcgccagcagttcgactatcaaatgattttttaatgataatactaaagcgtaccgctatctggtgaatcagatggcggtacttttttagtggaaataggctatactagtaaagaataaatcaataacgatgaggattttatgcatgactaaaaaattagtaattaccgaaaaaccgagtgtggccaaagacctagccaaagtgttggggactacgcaaaaaactaaaacttattatgaaggcgatcaatacgtgattacgtgggcgtatggtcacttattatcgcttaaattaccggaagacatcaaaaaagaatggcaacaatggcagttagaaaccttgccgattatccccaagcaaattgggctgaaaccactccctaaaacgacgggccaattaaaggcaatcagtcatttggctaatcgcaaagatattagtggcgcgattatcgcgacggatgcgggacgcgagggggaagctgttgcccgctatattttggaatggatcaagtttgataaaccggtcgaacggctttggatttcatcgcaaacgaataaggcgattcaggatggttttgcccatttaaaaccagctaaacaatttgataacctctacgcttcagcgttagcacgggggaaagccgattggttaattggtttgaacgtgacgcgcgcgttaacgactaaatatgaagatagtttgtcggctggtcgagttcaaacgccgacgttggcttttgtgcgcgaaaccgaggatcaaattaaccggtttaaaccgcagacttactatacaattcagttgaactatcaaggtcaaaacgcgacgttacagttagcgaatccccaacaattaacgactcgggaacaggctgatcaattagtcgcgcaattaatgcaacaaccgggccaagtgacggccgttcaaactaaaaaacaatcacaaagtgcaccattaccgtatgatttaactgaattacaacaagtggctaatgccaaatacggtttgtccgctaaaaagacgttgtcattggttcaatctctgtatgaaatgcacaaagccgtcagttatccgcggactgattccaaatacctctcaacggacatcaaggcgactttgaaggaccgcttatcggcactcgttaagtttgacccgcgtgcgaaacactatttaggccaaggggctaaagtgttgcaaccggccgtttttaatgatcaaaaagtgacagatcattacgcgttgattccaactgaagaaccagcccgggtcgctaaactatcaaacgatgaattaaaagtttatcggttaatcgtcgaacgattcttaggcttattcgcagcaccccacgttaccgcggtcaccaaagcgacggttcaatttggcaagcacacatttaacttcaaacaaactcaaatcatcgaagccggttggaaggccactgaagaaacgccaactaaaccttttgattggtcaaaaggtgcgacgattcctggtcaatttaagattaaggaacagctgacgagtgcgcctaagccactgaccgaaggaactttactcggtaaaatggagaaatatagtttagggacaccagcaacgcgggcagaaattatcgaaaaattggtgaagactgaattggtgacccgtaatggcaatcacttagcgacgacccctaaaggccaacagttattaaaattggtcaataaaagcctggtatcgcctgaattaacgggtcagtgggaacaatcactcgaagcgattgcccacggtcagaagaaacctgaggcctttattcaagagattgaaacggcgacgaaacaactagttacggaaattaagacgagtcaaactgaatatcacgattttgcgttgaccaataaaaaatgtccggaatgtgatcatccactaaaggaacgcaatacccgcgatggcaagatttatgtttgtaccaattgtcattatcgacgccgcaaagatccgaagatttccaatcatcgttgtccacaatgtcataagaaaatggcgattgttgaaggcaaaaatggcgccttcttccgctgtttaacgtgtggcacgaccgaaaaaatgatggacaagaaagatcgtaaaaagaaaatctcaaaacacgaagaacaacgtttattgaaacaggttaatcaagaagatgagcctgctgaaagtccgttagcagccgcattgcggaaagcgatggagaagtaaaaaatagcacgccaccagaaatatatctggcggcgtgctatttttatttcgaactattgcgcaaggttaacgttgtgccaatcgtaatcacttggggaatgacctggtcggcgttgagttgtttgattaacaattcagcggcggcttggcccatttgatcggtgtagacttttaccgagcttaaagtcgggaaggtgtattggcaaattgacgtatcgttaaagctaatcaaactgagttgttctggaacttgaatcccagattcatgtaaagcgcggagggtcccgacagccatcgcatcgttagcgataaatagggcttcaggtaaactagccgcatgttcctttaaaagctgcatcgttaattgataaccagattccggtgtgaaatcgcccgttagaatccattcgggatgatacaggtttttagtggttaaataagtttcaaaatgggttagtcgtggatcgacaccgagttgaacttgatcggcggtactttcttgaccggtcagcatgccaattttagtgattttttgagcgatgaaatggtcaagcacactttttatcggtgatttaaaatcggtcatgatacagctgatttcataatccaaggtattcatatcaacaaaaaccaaattagggtttaatttctttaaacgttggatttgagctgggctgtatttaccaatcacaatcacgccgagcgcgtcagaaagggtgttgaaggggtcgttttggaaaaaacgggtgacttcataacccaattcctgtaatttagtttcgacgcctaagcgaatcgacaaataatagagatcttccaactcttctttggcggtataccattcaacgatggcaatccgaccgtgttgcggattattttttttaggactcttcgtgtaatttaattgttccgccgcttcaaaaatacgttggcgcgtttcgtcgccaactgataaagtttgatcataatttaagacgcgagaaacagttgcgttcgaaacgttggctaattgggcgatatctttaatggttgccacaggcgcacctctcaattcgttgtttacctatctagtttagcatattaaaaccaattaaaacgttctttttaaaaaaatagtttgattttttagtaaatgtttagtaaaatgaaagcgattaataaaggaggaaattacgatgaacatgacagacttgaaaaacgcatttaaagaaacttataaaactgacgctgaggccagctattttgcacccggccgaattaatttgattggtgaacatactgattacaacggtggccacgtttttccaacggcgattaccttagggacttacgcaacggttgcgaaacgcgacgatcaaacttttaacttaatttccggtaactttgaagaagccggtgtgatttcatttgatttaagtgatctttcttatcaaaaagcgcataactgggcgaattatccaaaagggatgattgtttatcttcaagaacaaggctatacaatcaatcacggcttggatatttatttaaagggtaacattcccaatggtgctggtttatcatcatcagcctcaatcgaattattaatgggtgtgattcttgaagatcaatttaacttagacattgatcgcgttgatttagttaagactggtgtgatggtcgaaaataaatttatcggggttaactctggcattatggatcaattcgcagtcggcatgggcaaagccaaccacgcaattttattagatacgaatacgttggattacgatttagtcccaattgatttacaagacaacgtgattgtcatcatgaataccaacaaacgccgtgaattagcagattctaaatataacgaacgtcgtagtgaatgtgaagctgcacttgcgattttacaaactaaaaatgatattcaatcattaggcgaactcgataatgaatcattcgatttacaagcttatctgttacaaaacgaaacattattgaaacgggcgcggcatgctgtttctgaaaaccaacggacaatgaaggcccgtgaagcattgaaagataacgaccttgaacgcttcggtaaattagtcaacgcctcacatgtgtcattgcaatttgattatgaggtaacaggtgttgaactcgataccttagttcaaaccgcttgggaacaacctggtgtcttgggtgcccggatgactggtgctggttttggtggttgtgcaattgcaattgtggctaaagatcaagttgaaaactttgaagccaacgtcgcgaaagtttacaccgctaaaattggttacgcaccaagcttctacatcgcagaaattgcggatggcgcaaagaaattagattaatttaagggggaatctttaatgtcaattttagttttaggtggggccggttatatcggttcacacaccgtcgatcaattaatcaaccaaggtttcgatgtcgccgttgtcgatagcttaatcactggccaccgtgctgcggttaatacccaagcccgtttctacgaaggcgatattcgcgataaagattttatgcggaccgtcttcgaccaagaagaggttgaaggtgtgattcatttcgcagctttctcaatcgtcccagaatccatgaaatcaccgcttaaatatttcgacaacaacacttatggcatgaccgccttattggaagtgatgacggaatttgatgttaagaagattgtcttctcatcaactgcggccacttatggcgaaccaaaatcaattccaatcaaagaaaacgatccacaaatccccaccaatccttacggcgaaagtaagttgatgatggaaacgatgatgcgttgggccgacaaagcttacggcatcaagttcgtcgcgctccgttacttcaacgtcgccggcgctaaagcggacggttcaattggtgaagatcaccatcctgaaacccatttattacccatcgtcttacaagtcgctgccggcgaccgtgacgaactctcaattttcggcgacgattacgatacaccagatggtaccaacgtccgcgattacgtccacgtgttggacctcgctgatgcgcacatcttggccttcaagtatttggcagccggtaacggcagtaacgccttcaacttagggtcatcaactggtttttcaaacatggaaatcgttaaagcagctcgtaaagtaactggcaaagcgattccaacacagattgcacctcgccgagctggcgatcccagcaccttgattgccgctagcgacaaagcccgtggcacattaggttggcaaccccaatatgacaatatcgaagcgattatcgaaactgcttggaactggcatttaagccatccaaacgggtatcaagacaaatagagggcaaattatgcaagcaagagaattgattcaaacgtttattgaaaaagtactcgcttttccagcgactgattacacaaaagacgatcaacaatatttatttaacgtggtactagacctggtcggtgaaggtgatgccgcagcaattacaccagcgagtcagcagttaattgatttaaaagaagcgttacttcaattagcaatcgccaatcaccaaattaacgatttagcggctgaacaagacattttaggtgctaagttgatggatttggtgacaccactcccgagtgcggttaaccgcaatttctggacgttatatgcgactgatccgcaaaaggcgttggcttatttctatgaattaagtcaagctaatgattacattaaagttgcggcaatcgctaagaatatcgcgtacgatgttgatacaccgtacggttccttggaaattacgattaatctgtctaaaccggaaaaagatcccaaacaaattgcgttggctaaaacgatgaaacaaaccggttatcccaaatgccaactctgtttggaaaacgaagggtatgcgggccgcttagattttccagcccggcgtaatcaccggattgtccggtttgaaattgaccaccaaacatggggtttccagtattcaccttatgcttatttcaacgaacacgcgattttcttggacggcaaacacgaaccaatggtgattagtgccaagacgttcagcgatttattaggaatcgtcaaacaattccccggctattttgcggggagtaacgctgatctacccattgttgggggctcgattttgacccatgaacactatcaaggtggtcgccatgattttccaatggccaaagccgtgattgatacgccggttcaatttaaaggttacgcagatatcaaagccggcattgttaattggccgatgtcagttatccgtttaaccggtgatgatgggactcaaatggccgccttagcaacaacgattttagaccggtggcaacactatagtgatcctgaggtccaagttttagctcaggacgctgatggcacaccgcaccatacgattacgccaattgcgcggatgcgcgggacgcaattcgaattagatttggttttacgtgacaatcaaacgtcagccgaatttccagacggtctctaccatccgcacgctgatgtgcagcacataaaaaaagaaaacatcggtttaattgaagtcatgggcttggctattttgccaccccggcttaaaactgaaatggccgaagttgaaaagtatttgtgcgaccaacccaacgagatggcggcctatcatcaaacgtgggctgaccatattaaacgggcacaaacagtgacgcgtgcaaatgtcaccgaagttgttcaaacggcaatcggtaaagtctttaaacgcgtgttagaagatgctggtgtctataaacggaatccacaaggtcaagcggctttccaacggtttattcaaaatattaatcaataggaggcaacaatcatgaaatattggcgtcaggaatttggcacgattgatggtcaaacgatttggcagcactggctagaaaatagtcagggttaccaaatggcggtcattgattacggggccacgattactaatttagtgttacccgatcaagctggtcagttcaaaaatgtggtgattggttatgataatttagcggattatatcaaacaggatgcttattttggtgcaacggttggccgcgtggcagggcggattgcgcaagggacttttaagctggatgatcagacttatcacgcgccaattaacaatggcgtcaataccaatcatggtggtccgaatagtttcgaatcacaaatctggcaagcgaccgtcactgaaaaagccgacgcgattagtgtcagctttgcgttgactagtccggatggggctaacggttttcctggtaacttgcaagtgacgacgacctatacgttgactgaaaccaacgattggctcgttgattatgcggccacgacggataaaaagacgttgtttaacccaacttgtcacgtttatttaaatttaactggtgattttgaccaaaccgtcgacaatcaccagttattgatcaacagcgattattatggtgaaattcaacctgatggtctcccaactggccgactagcgttggttgaaaatacggcttttgatttaaaccatgcgcggccattagccgatgcgtttaatagccaagctgagcaaaatcaattggtcaacggttatgaccatccattcttattaactaaaaagaatgccaatgtggatgcccaattgaccgaacccaccagcggtcgttcaattacgattaccactgaagggaacgcgattgtgatctatacggccaacggattcggcagtgaaccgaacttaaccaatcaaccgattaaaccacacgaagccgttgcgattgaagcccagatgatgcctgatgcgattcatcatccggactttggcaacatcgttttagacgtcgatcaagcttatcatcgtcaaacgaaatatcacttaaattaaaattagttttcagattgcatgcggtttcaaaatcgcgtataatagtgtttgtctagaagatgactagataatatagtgaattttaaaggagcaacatcatggaaaaaggtacagtaaaatggtttaacaatgaaaaaggtttcggctttatctcggtcgaaggtcaagaagatatctttgtacatttcagtgcaattcaagacgaaggctttaaatcattagaagaaggccaagctgttgaatttgatatcgttgaaggcaaccgtggaccacaagcggctaacgtttcaaaactataattgataattaggggctacttggaatcttttctgagtagcttttttagttgacaattaaggtcatatcggataacgtgtaagtatcatctaaatactaacgattgcactgacagtagagattgggcaaattattaacagaaacctagattgctgagaactaggaatgatgccgatgtcgaattacacagcgcgcaaaaaatcgacgtgtgattgacgtgccaatcaatgagtgatgttgtttcggcaacataattcgggtggtaccgcgacttaaactaataattcgtcccaattaactttcaattgaaggttagttgggactttttttataggaggaaaaaacatgcaaaaaaatattattgatgaattaacttggcgggatgctgtcaatcaacaaacggatgccgaagggttacgggaattagttgagcataaaagtatttcgttatactgtggggtcgatccaaccggtgatagtatgcatatcgggcatttgattccgtttatgatgatgaaacgattccaattggctgggcatcatccctacatcgtgattggtggcgggacgggttccattggtgatcccagtggtcgtaaatcagaacgtcagttacaaacaatggcgatggttgaacataatgttgaagccctttctggtcaaatgcgtcaattgtttggcgccgatgctaatgtgtcgatggtcaacaactacgactggttatctaagatttcattgttagatttcttacgtgattacggtaagctctttaatatcaatacgatgctcgctaaggatgttgtcgcaagtcgtttagacgtcggcatctcgtttactgaattcacctaccaaatcttacaatcagtcgatttcatgcacctgcacgatgcgcatgacgttcaattacaaattggtggcgccgatcaatggggcaatatcacgtctgggattgatatgattcataagattgagggtagcgaaactgaagtttacggtttaacgattccgttgatgttaaaagcggatgggactaagtttggtaaaaccgctggtggcgctatctggttagatcctgaaaagacatcaccatacgaattctaccaattctggttaaaccaagatgaccgcgatgttgttagatatttgaaattctttacgttcttagaagaatctgaaattgatgaattagcacaaaaaatggcaacagcccctgaaaaacgggaagcacaacgtcgtttggctgaagaagtcacacgctttgtacatggccaacatgaattagaaggggcccaacggattaccgaagtcttgttctcaggcgatatcaaagtcttagacgtcaacgaagcggaacaagctttccaaaaagcgccaaccgttgaaattacgaacgaggtcaaaaatatcgttgaattcttagtcgatgccaaaattgaatcgtcaaaacgccaagcgcgtgaagatgttcaaaatggtgcgattaccgttaatggtgatcggattcgggaaacgacggctgaaattaatccggccgctaatttcgatggtaagtttgtgattgtccgtcgtggcaagaagaagtatttcttagcacgcgttaaatagcacaaaaatagctcatccaaatcaaggttttgatttggatgagctattttaaatgatttagtcagcgggttaactatattttattttctgaaaatagcgtataataatcaagattgaattttattaaaatgaaagaaagtgactaaatggcattaagttacgcagataatccgaaagttcaaaagaatcgttggtggattctgaccgccgtgggcttgtttacattcatggcaactttagatggtagtatcgttaatatcgcgctaccagtgatgagtaaagatttaaaaattccgatgaaccaatctgaatggatcgtctcgatctatttaattgtcatctgttcgttattactattatttggtaaggttggcgatgcctttggtaaagtcaaagtctttaagattgggaccgtcttgtttgtttttggttcattattatgtggtttcaatagtggtttaaccgttctgttgattgcgcgggcgattcaagcgctaggcgcatcaatgacgatgagtaataataacgggattatcaccgaagttttcccgattaaagaacgagggcgggcgttaggcttaaccggatcgttcgtcgcattaggcagtatcgctggccccggaattggcggcttaatcctatcccactttagttgggggtatattttctggattaacgtaccgattgggattttaacgattatctttggtcaatttgtcttacccaaagatattattaaaacccatgagaaaatcgattattttggattcgctggttttgcattattaattgtcagcttgttcttaggcgttttcattggccaacaagttgggttcacgcaaccaggcgtcttagcgttattcgcacttgcgattatcagtgcggccgcctttgtctggattgaaaacaatgttgaaaagccattgttatcatttcgtttatttaagaatattgatttcagtttaagtttattatgtgcgtttctaatcttcatcgtgacgttcttcttcaacgtgattgcaccattctatcttgaaaatgcacgtgggttcgaaccgagtaccgcgggctatatcttgatgattttcccaattgtccaagtgatcgccgcaccgattgccggcacgatttcggataaaattggtccagaactattaacttttgttggattagttttgatttgtatcagtcaaatcggttacatgacgatgaatttacaaacaccagtctggttgttcatgttcttcgttgggctcgttggtttaggcaatgggattttccaagcccctaataatacgattgtcatgagttctgtcgatgtcaaagacttaggaattgccggcgggatcaatgccttagcgcgaaacctgggtatgattttcggaatttcatgtgcgacgaccgtcttattttcagcaatgagccgtgaatacggtcataaagtgacgacttatttaccagggcatgcggacgtcttcatcgctgggatgcacgatgcctttatggttgctttagtgatttgtttagtcgcgactgcattaaccggttggcgtctcttgaaacaccgtcaacaagctaaagcggcgcgttagaatagcgttatcaggtaaatcaaaaatggcctcatccaaagtcggatgaggccatttttagttgacgcagcttattgcaccttaattaacgttcttaggaccgttattgtgagtcatttgatccgtttgaccttgtgtataggccagtaggtgatcgcgtaaatcattttccatgtggtttaattctttttcagcgacctggcgtttttcatgaccttcttgttgaattttcaaggtttcttgaagggtttcaactaaatcattttgcgtcttctgaagggtttcaatgtcgacgacgccacgttcattttccttggcggtttcaattgaagaaatcttcaacatggcactgtttttcttcaaaagatcattagtggtttcagaaacttggcgttgcgcagtgaccgcgtctttttgacgcaaaagggttaaggcaatcgccacctggtttttccaaagtggaatggctgtattgattgacgcttgaattttttcagccaaggcttgattggtattttgaattaaacgaatttggggtgcttgttgtaacgtgatttggcgggctaattctaaatcataagtccgtttttctaaccgattcttgaattgatttaaatcattgacttcttggacgatcatttgattgttatcattttcagccttggccatcgcagccggaatttcagttgtttcaagggcttcaatctttaattgggccgcggcgatgtagatgtttaaggcgtcaaaataggctttatttttatcgtacaaggtttctaaagtcgtattatcacgcatcaaggcatttttttctttatcgagtttaacggcaatcccatcaatttgggcgccaattttttggtacttcgcggtaatttcataaactgatttcttaatcttaccaaacatccgtttaaagacgttgtggtcctcagcgcgtaattcatcgggatcggcttcgtttaagcgatacatcaatgacgtcagtgcgtcaccaatttcaccggtttcttggctttgaacttgattgagcattgtttgtgagaattcgcctaattttttctgggcgtgagcgccatagtttaaaacggcttgttgatcggtgctatcgagttgttccgccatttgttgggcttgttgttgttgttcaggtgatagcttggctaggagttcttcaccattggcttttggttgattggcttgcgttgtggtgggagtgctttgatcaaatggatcgtttagtaaatcggccattaaatccgtttgttggttagtcgtttcggtcatcgttttgctccttagttaattgttgattagcgacggatacttctgtgtcgagatcttctagatcatcggccacaaattcagtatagtcggtttgaatttgttgacttaaagcggcaattgcttcagcggatttatcgagaacggcataggtatcggccgtcttaacgtcgtgttggctaatttcaataaatttacgactcagttcggttaatgagggcagatgccggtataaaaagtcgctggcgttgtgcaatttttgcggttctttgacgatggctttaaaaagcgcttgggtcgttttaaccgtgtcgtggtttaagtcgatggcgcgtaatttagggagtgcttgtagattagtagcgacttctttgacttgaccttcagccagttgcatcgtttcacggaaaaaattaatctcttcattgctcatgccagccgcttggtagtgggctaacatgttatccgaaattttttgttgaatcttaggttggcgatttcgaagtaattggcgataacttaagaaaatatagccaaacgccatcaaagtaccaagtactagccacattgggttattcgggatatcgaaatagttgaatattccaaaaaagagccatgtggtggccacgaagactaaaaaactaataagccatatttttaattgtttaagcattttcttcagctcctacgttcatattgttgatttcattctaacagtaatcggcacaaaagagtatccgcctaaggatggatatttaaatccgtcttagttgttaactttactttagaagggtgcgacgatttctaaaagcgcgtataataaacgagacatcattccaagtaaggtggttatccaaatgacgtatactgaaaaagtcttatctgaagaatcgatttttaaaggacaaatcattgatttggcggtccaacaagtagaactgcccaatggtcaaacggcgcggcgtgaaattgtctatcacaatggcgcggtcggaatcattccgattaccgctgacgggcgtttaatcgttgtgcgacaatggcgggcgcccatgcaacgggagacgttagaaattcctgcgggtaagattgatttgggtgaaacccaacttgaatctgtcgcgttgcgggaattaaatgaagaaacgggtatgatgaccaccgcattaaagggcgtcgctaagtttttttcatcacctggtttttcgaacgaattgatgacgttgttttacgccgatcaactaacgccggtagttcataaacggccacttgatgcggatgaatttttaaatgttgaaaaattaacgttggcagaagcacaagcagccgttgccagcgggttaatctgcgatgccaaaacgattatggcgctctattattggcaactacaaacgaattaggagtagatagcgatgacacaagaacctaagacgcgcgaagcttatcggcaacaaaaagaagctgaggaccaagcgtttaaacaacgtgatcaagaacgactcaaaacggaacgtgactattcacgcgaaaaacaaaaagccgcttttaaagccgtcaccgaagaagaagaaccgaccactcgtcggggtaaaaaagttgatttgccagcggttaaacgtttaaaaaaacggttgaactgggcaatcatcatcacaattttattgattattatcgtttacttgattctttttttcctataaaatagtaatggttaagaaatggagcgaacaaaaatgaaaattagtgttatttgtgcaatggaagaagaaatgcggacattgctcgctaaattagaagacgtcaccaatcatgaggttgccggcaataccttttataaagggcagctgtacggtcatgaagtgacattggtcgaatcagggattggtaaagtccaagccgggatgacgaccgccattttattggctgaagaacaacctgacgtagtgattaataccggttcagctggtgggattggtgcggaccttaaagtgggcgatgtcgtgatttcgaatcaagttgcgtatcatgacgcggatgcaacggcgtttggttacctgttgggtcaattaccccaacaaccacaaaaatttgacgcggacgttaattacgttgaaaagattgcggcggcagcaactgccgttgaccttccctcaaaagtgggcttaatcgtgactggtgatcaatttgtggcgagtcaagataagattgcccaaattaaaaccatctatcctgaggccctttcttgcgaaatggaaggcgcagcaatcggtcaagtggccacacaatttaagacgccgtttgtcgtgattcgtgcgatgagtgatgttggtgatgaagatgccggtgtgacgtttgacgaatttatcattcaagcgggccaaaagtcggccgccatgctattaaatttcttaaaaaacatctaatttaaggagaccaacgatggaaaaattttgccaaagttgtgggatgccactaacaactgccaatcaaggcactcaaaaggacggaaccgctgcgcaacaatattgtcatctgtgttatcaagccggtgaatggactgaaccgactgcgacttttgaacagatgttagccaaagggattgccggcatccaagcggattcaaccaccggtcgctttaaaaaatggtttttagttaagagctatccaatgatgttgaaaaaagttagtcgttggcaagctaaataaataattaaaacgttaaaattagccgttacaagctgattttaacgttttttgattgcataaatcgggtctggtcgctacactagttaataaagtcactaactcaagtggagggttctcatgcaaaaagcgattcaagattattggcaacaatttgtcacgcaacaacaattatcaacacaacaacccgttcaaatctacgcttttggcgataatccagccatggctgacgaattagcccaattagtggttagcggtcaaaagacggcgacgacttccgcaatcgcactctataccaaggatgaaccggtgccgcaggtcggtgattacaacattattctagatggtcagggtcaacccgttgcaatcacccaaaccagccggtgtgacatcgttgattatcaagatgtgactgaagaacacgcctatttagaaggcgaaggcaaccggacgttagcgtattggcgttcagttcacgaaccatttttcaaagcggaatacgaagcgagtcatcagctgttttcaccaacgatgccttgtttatgtgaacaatttattctgttgaaagctaaaaaaaacaagctgtgacagaactcggttatcaattgagtatcaagtctaaaaaccagcctattctgaattaagaataggctggtttttgatttgaacggaaattgatgagttctggcgcgcgtgaaagaagtgcattcggttaacatcaggatactaagacgtacgtcgcagcttgttttttatagtgtttggagttgagtcacttttgctggtgacttcaaaatggtctgtagcggtaaatcaaaatcaatttggtggtgttcattgaagacgacgacccgttgcgcaatttgtttgacttgttcgaattgatgactggcgattagaatcgttttgccggcttgatggaggactagtaaaacttggctaatcaaagtttgataggccgtcgataggccgttaaagggttcgtcgagaacgatcacttcaggattcatcgtcaagacgcaggcaatcgcaaccaatttcttttcaccaccggaaagttggtaggggacgcggtcagcgaggtgttcaatgtgtaacagttgcaggcagtcgtgcacgcgttgctgaacttcagtgttcgataaccccatctgctgaggaccgaatgttaattcagctaagaccgtttcgttgaacagttgcacgtcgctgttttgaaagacgaaaccaatcgattggtgtaattgggtgtttagcgtagccgattttaaaaaggcgtgatcaacgcgctgagttttaaactcaaaataaccgctggtcggttcaattaacccgttgatgagtttaaaaagggtcgatttaccagaaccattcggtcccatgaaagcgacgaattcaccggcatcaatcgttaaattgatatcgactaaactagcggtttgaccataagcgtaatgaatttggttaagttttaacattaattggacctccgaataaagaataataagccgaatagtccgacattgcagattagtgattgccaatcgcgccaactaaactgcgcttttttgggtacgactggttggccagtatagccgcgtagcagcattgcttgatagagttcattgatgtagcttttagcgctcaggtataatcgtccaatcaaagaaccgactaactgtttggtttggcggcttgtccgtaattgaatcgcccagagggactcttgtaagaattgagccaagacgtgactatattttaaagtaatatcaaacgtcaggatcagtaaattcggtaaatgcaattggcgtaatcccaatagtagttcgggtcccgacgttgtttggagaaaataggcgagattgcagactaatacggctgtccggcacatgaaaaaaagggtggtggccagttgaccgatgactagattcggcaaaattagacagagggcaattccacccatggtcagtgcccgtttgactaagggccgcagtgcttggactggcaatcgacaaagtttgaagagggttagaatcgtcaatagccatagaaacagccattggtgggtcgaaacaatcaggatgacggttagcaataagttaatgagttggagtcccggcaattgtttttggtgcgcaacgacggttgacggttgtgttaaacggctcagtaattgttgaacgagtgctagatttttaattaaaaagcggttgggctggcctgcaacgagcgccgcctggtcagtagtttgtaaccaagcgggtagtttaggcgcggtttgtgtcatgactaatcaccagttttccaagtaaataacaaattaataatgcggtcaatgcggataggatataaccgattgaaacgggtaatccgtgaatggcatagtcgctgaagagggcgttaaaatgtaagccgtgagccatgccagtcggcagtttttgcccgagatgcgcccgtttgagttgggctaataattgagcagcgtcccactcaccccaagcagtgccgtgggcgagtaacccaagcggactgagaatcgctagtaatcctaaacagccataacaataatgacgcaattgatggcttttttgaagatcaggcgtgagttgtttgggcgtgtaaagttccgtgggcgcaacacgttgtacaaattgaaaaacagcaaaggtcacgccggcttccacccagccagcgattaataaatgcccaaacagcatcgctggaatggtcatgtgcagtggatagggggcgtatagtggttgaccggcggcgttgtgcgctactagcggttgtaacccgagttcaatactggcgaccaacgcagccatattgatcccgacgtaagcgcctaagatgacgcctaatttttcgtgatgccatttctgtgcgagccggtaaagaccgtaaccgacaaacggcatgatgcaagccatattgatgatattggcgcctaaggctaatattccgccgtcaccgaatagaaaagcctgcatgactaacgccatcgtgacggccaaacaggcagcatacggtccaatcagaattgctaatagcgtcgcgccaacagcgtgggcggttgtgccgcctggaattgggacgttaaacatcataatcagaaaagataaagaagcggagatgcctagcatcgggaccgtttcttttttttcggcaatttgaattttaactttcttcaaggaaagcgcaatcacggggactgcggcggtaaagagcaccgcacaggtttgtggacttaaataattatcaggaatatgcataaaaataaaacctccgatgagtttatcactgccattaagcttacgcgtctcataggggttttcaaacacgtttcatgtttacaaatggtaacaaatcagttggcgatgttgtctagtaaatagctgacatcttggattaaaaacttatgatcgaccgtttttaacacgccatcttttttaagttgaacataaatcatatacatctttcatagtcatttcattaggattcttatcactattttcattttgataatattttaccatgtcaatcttataataatttacatcattttttcgtaaattacaattttttatttgtgaaattaaattttttgcatctaatattacgaaaggtctatctttaaattcttcaactaagtcattaataaaagttgatttaattgtatatgtattttcttttaatggatttacgataaattctgttactggtaaaaaaacaaacgaagcaattgcaacatgcttaatttctggatattcaaatgataacgttgcactttctacaggtaattttaaatcttctccatcaatatttattctaattaattcattactaacatttaattttttttgatgcgttccttcttttggatccttaattcccaataactcattatgttcaacctttttaaaatactgaatattcttaaaaaagatctccccttttttaaaactttcaatatattctttttcaataaatttaagtaataacccttccattacgttgattccccttaccatatattttttaaatcaagtatacagggttagaccaaagaagtcccgccattttgacgagacttccacagttttcctatactcaacaaacggcaagacatttgctttaactaaaatatcgattcctaaccactcgttatctcatcgccacattctgtccgccgacttttaaacagccgcattcagacattgtggcgatttgggtatccaattggaccatcacgtcgtggatcacccgtagattagcgcttggatcatggcgacagataaatagcggtaaatcattgcgcagataataatagctcatcgaatcaacgcagccaacatcggtctgctgtaatgtaacctgtccgatttcatccagggtgattgaatattgttgattaatctggattggttcaaatttagtcattttgattattctccttgaaacacattttaaattaagctttttgaatcgaatagatggcgtcaattgcaacagcttgattattaataatgatttgactcccaaaccaaccgctgattgaccccactatttgatgtggaatcaacccctcaacggttcgttcagctttatcaaccataacaggatagcccttaaccactgcctcgttgattaaggccgcaatctcggcttctgtcattgttgggccatgttgttgactacgcgcttgctgattggcagtcgctgtcttggcaaccactgcagtatggtcacttaaatagaacccttgccacttcatcatgccccgatcatggtaatcatattttagaaattgattgactaagttcggatcatagccatcattattcatacgtgttacctccggcgtggccgccaaccagaccagcgcgttcaatcgcagtagccccttttgatttacttgataatttaacgaccgacttaaacccgtacttctgacgaataccatcaaccgtccgatcaagtttctgcttcttaaagttgacgtctttcacatcaaataaatcaagctgtgcgacatggtcatccactaactcaccgcacgtaatactaacgtgtcgaatcgtttcatggcgccatttagctcgaaacagtcgtaaggcgtgttgcgtcaattgaccattcgcattggtggcatcaattttaacggagtgcccaaagccagtccgtggtgaatcggctttttcagaaaacgaaaaaccaatccccagactgataacggtcgctgcttgatgatgcgaccgcaatctggcagcgacttgttcgacaatctcgcgaatcacaacttcaatttcagcttgattcacataatcccgcggcaatacttggctgttgccatacgacttctctttggtgtgatacttttcccgaattaaagcccggtcaatcccccagctaatcgcaaataactgactgccgataattcccattttttgtttcaacatgtacggattagtatgggctaaatcagccattgactgaatgccgcgttgattgagtttatcagccgtgcgctgtccaatcgaccagacatccgctaattgggtgatcggccacagcttatcgggcacatcttcataatgccattccgcaatcagactatgattctttttagcctcaagatcgagggctaacttcgctaatacaggattatcgccaattccgacggttagataaataccggttgcctttttgaccgtcaattgaatctgacgcgcaacttcatgcggtgttgcgccaaacaaatgccagctatccgtcatatctaataatgattcatcaatcgaatagggatgaatatccacttccgccgtaaattgttgaaaaatccgattaattttcaaattctcttggatatataagttcatacgtggggccgcaacaatcaatcgcggatcatcgattggcacatcacgcgcccgcgtcacattgctaatgccaaatatttttttagccatcggactggccgctaagaccaacccgcttcccgtattttcagccgcggacatcacaaccaagatggcgcgtagtggattaagctgcatttcaactgcttccaccgatgcataaaaagatttagaatcaatcataaaaatcactcggtgtggttcattctgataatcatacattaggcactcatggccgttctaacgtagtattgatcaatcacgagttgctttctttgattgtagtggccgtaaatggcaatcggcgcatcagtttcagcaacatacataaagttcaacgcgtcttttgcaattaaacaattataatcttgagttgtggtctgcaacgtaaaccgcaccaaatacggatcgaaactaatcactttaacggcgctgataatcgtcccttttaaactaatatttgtcatattgaccactcctctatgaattacattatacgaacaaacgttctggttagtcaagtgatatttatttgttataataatgttatcacgcgtcgtaaaggaatttgcacgcgaccaaaaaggagttttcaacatgtcatcaatggcccattcagcgttaacgctgctactattcgtctcatccgtcgcagttcttatttcaactgtcatgaccttcatcggttttttgaaaaagaatcaaactttaaaaaaagccgcgacggtcgttttttggattagcatcgtcctactattaattgcctaccaattattgaaatgaccaatccctatttcctaaaaaaataacaagctgtgacagaactcggttatcaattgcctatcaaattggaaaatcgcctatcccgaactaaggatagacgattttttgatttgaacggagattgatgagttctggcgcgcgttgaagaggaatgttcgcttaatatcagaatactaagacttatggcacagtctcttattttaattatctatcaatgtttaaatatcagaccaaatattaatggtaaggcaaaaacaaaactgtcatatagtaaatgcgtcacatacgttaaccaaatatttttggtcttcaaatataggacgtccaaaattaatctcaagaaaacaatactggtgaaaaccatcggtacgttccattgataacttggtaaatgtaaagcaccaaataaaattgaagtgacgattgtacttaaaataatactgattttacgactaacaccaagcgcttttaaccccgccatcatcgctaataacgggattagactgattaattcttcccaaaaaagacttagaatattatccaagaaaactgccaaatagccgaccaaaccagtaacctgatcacccgccacatcaccgttagtggtctggccaattagattcagagcaatcgtactgccgagtccaatgaccaccatcaatagcacatatttgataatcgttagtgtatcgcgccattttaaaggtttaaacaacgccccaatagcgtgtttggtaaaccaccacaataagcccatcggtacgccaaccaaaaaaatatccattagtgcagtcgcaatcccctttggtagaaaggataaggtcgccgtactcataatccagaactgtgcgagtaagacaagcaccaggctaagccactgaactatcgttaatttttgcggatcgcccgcataatacggaaaatcgccactatttttttcaattttaaaataatcccgttgcactaaacacccctcctaatcattaacgccatttctgattgattcatcctatcctaccattgatgtttagcggctgccaactgataagatgcacaaaacaaaaaacacaccaatccgcaatcgaattggtgtgtcctattaatgttatttaagcttaataccagccgttgcttaaccagaagctcttagcggcgtcccatgaaccgtaacggctcgtgacgtattggtcagcgaccttttcttgattggcagctgaatagtcaccattcaagtatgacgctgataattggtaacgaccgattaattgaccgttagtggctgtatatgaaccgccggattccttttgggcaatccattctttagatgagctcgtggttgcggcagttgcggttgtcgttgtggcagctggtgtcaccgttgcggcttgaactggtgtcactgtttgagtcgttgcgaccggcgttgttgtttgcgctactggtgcggctgcttgagtcgttgttgaggccgttgtatccgcatcaatcgtcaattgttcgccgacgtagattaagttgatatttgagatactgttgttcttagcgattgaatcaactaaatcgttgttgccagcgaatttatttgagattgatgataaagtatcaccagttgtaacggtgtaagttgtggctgcacttgcttgaccgttgcctgcgaaaaggattccagcagctgttgcggccgttaatgttgtactaaataagattgtttttaaaggtgtcatgtatgattgatctccttgaatttaagttttgtgtttcaacgtgtgactaatataccatctaaattcccgttgtaaatatcaaacaagtaacaattgatgacaaaacggtaacagtttaacggcaaatcccgatcaatctgtaatgaacaccgcttcattgcccgtccttaaccgattcacaaaaaaaggcaacgctgaaatcccaattggattcctagcattgctttttttaagacactttaattagccctcttcacgcttcttaaggtggtattgcatcactggtcgttgtcgtccgagcactaatggcacccgttcaacaaagacttcgctatattcaagaccgaaccatgaagccggtgtatcggtaaatttctctagccataaccgcatttggacaattactttatcgcttgctttaatctgcgtttctggcgataaatcttcttgggtgatcacgaatgagaaatcaccaacatcccgatttggaatcgtcgtataatgttgcggttgggctggtaattcaccctcccgaatcatttcatggataatctggcgaataaagacattcactttttgttccatcttaaagccgagatatagctggacattcaccatataatcagtattcaacgtatcagttgtatattcagcagtgtaaggttcatcggtgacattcaccgttacgaaccagtaaacctgcgcccgtttaggccgcttgtctaaaatcgaatataaaatattctttttgattttattcttttcttgttgttttgataaataaaccaaattggttgtgtaaagtggtaaactttcatcatttcttaaatcatgtagttgtttcttgaaagccagtaatgatacggtacttgacttaaaggtattgctatccttgatggcattactccgataccaaacaaacatgatgaatagaattacagcggcaatgatgacagtcacgtaaccaccatgcatgaacttggcagcacttgaaatgaagaagacgatttcaattgccccgaagaagaacaacacgagataggccaatagccaccgtttttcgtaacgacccaagaaatggaacaataggatggtagtcattaacatggtaatcgtaattgctaaaccgtacgccgcttccatgtgtgctgagttcttgaagtagaagacaacgcctaaacaaaccgcccataaaatccagttaacgattgaaatgtagatttgaccttttaatttagctggataatcaatcttgattcttggcaataagcgtaacttaattgcttcagaaaccaaggtataagaacctgagatcaacgcttgtgacgcaataatggccgctaccgttgctaatagaattgatggaatcttcaaactagctggcatcgcttcaaaaaacgggttaaaatcagccgcattttggaaaccagtcacgtgttgatgttgaagtaaccaaacaccttgtccgaaataattcaacactaaacaaaccgcgatataaggccaactaccatagatattcatgcgaccaacgtgtcccatgtcagaatagagcgcttcggccccggttgtcgctaggaacacactccccaatattaaaatcccgactttattttcaggactaaataacaggtgaatggcgtagtaaggatttaacgctttaagcattgttaaatcgcccattaaattaattaacccaatcacaccaatgaaggtgaaccaaatgaacatgattggtccaaatgatttcccgattaaatcagtcccaaatttttgaataaaaaacaggagtgataaaatcgagaccgttaagataataacctgctcttgcgaagtcactaaaatattgccgttgattggaaggccttttaacccttcaatcgcagtggtgaccgtcacagccggcgttaacatcccatcggctaacaatgtcgccccaccgataatggcgggaatcactagccacttagcctgtttacgaattaacgtgtacaaggcaaaaatcccaccttcaccgttattatcggcgcgtagtgcaatcatgacgtatttgacggtcgtcattaacattaacgtccaaaaaacgagagagatactcccgacaataaaatcttcgctaatgtgcgctaagcccccattgccttgaacgattgacttcataacataaagtggtgatgtcccaatatccccgtaaacaacacccatcgtaatcaacataccagcaatagagagtttctgttgcgttgattttttctctgtaactaatttcatttccggtaacttccttatcctttgatatatcaaccatagtagcttgttcaaagcggaaagtaaagttatatcctaaattattatttagaccactcaaccgcctctaactttatctgttaagcccttttatgctacaataagattatcgaagtaaatgagggataaaccaatgaaagatcaaaaaaaagtagagattgccaagaagcaatacaaaaagctggtcaatcgaccattatcaaaagaacgtaaaaaagcggtcagttcagcctccagttatctattcaccgtcatgctgattgcgttagtcgcactcgttatctatctagtgttgcactaatatgtaaataattttcaaaaactcattgtcgttttgctatttcgcaaacgacaatgagtttttttatagctctaataattgaatgttttacttttacccagtataatgaacaatacagtttgtcatcgcccccatttgacgaataatccgaacattactcacaaaggagtttctaatgtcatctaaaaaacaggtttatcttgcaggtcctttctttagtcccgaacaaactaaacgattggatcaagtcgcaacgttgctagctaagaacccaacaatcgattcatccgccatttttcggcctggtgaccattcatatccagatgctgaattcggtactttcgaatggcaaaccgcaaccttcaatattgatattcggcaaatcgatcaagcagacgtggtggttgcaatgcttgattatcgccacgaagagggcttaacagaacccgattcaggtacgatgtgggaatgcggttacgccgtcgcccatcacaaaccagtcattctagtacgttatcgagacgacttaccgattaacctgatgttaaccggcagtgcgactgccatttttaatggtgcaaatgacatcgccaacctcgcttcttatgatttcttcacgttacaaaataaatacgtccagactgacgtttattagccccaatacaaaaagccacccgctaaggtggctttttgtattggggctagaagccgttattttggcttaattgacggaaccattcgccgcttttcttcatagttcgtttggcgttatcatctaaatcaactcgataaaaaccgtaacggttctgataaccatttaaccaagaccaacaatcattaaaggtccaagtgtggtaaccgaaacagctactaccgtcttgaattgctcgatgtaattgttctaaatgttcagtcataaattcgattcgataatcatcttgaatctgaccatgatcgtccatgaaacgttcttcatcggcaacgcccatcccattttcagaaacgtaccatggaatattgcggtattggtctttcatcatcattgcgacatcgtataacgcttcaggatagatttcccaaccccggtatggattaatttttcgttctggccaaatgtatggcaaatataaatcatcagtggtcactgctggtacttgaggattttcaggtgcttgcacgcgtagtggttggtaataattgaccccaacaaaatcaatgcaattagccgcaattaactgttgatcagccgcttcggtaacgggtaacaagtcattttccgctagtagttcaaccaaagcatccggaatcttgcctaggactgtcgggtctaagaaactcttcgctaaaagtaaatcagccttttctttagccacttgatcggctggcgcgtcacttttagcataagctggtgtgatatttaagataatcccaatttgaccatcaggcttcacttttttaaattctgcgaccgctgctgtatgggccatcaaagtgtgatacccgacttgaaccgcctttttaaaatcaacgatatctggataatgataccccgttaaataaccacattcaatatgcacgattggttcattaaaggtcgtccaacgatcaacgagatcgccaaataattcaaaagccgttttggcataaaaagcaaacgcgtcaactgattcgcgggtttcccaaccacccttttccattaaccaccaaggcatatcaaaatgaaagagattaatgattggtgtaatgccagccgcctttaactgactgaaataatcgcgataataatcgactgcaacctggttaacgtgcttgccatctgggattaaacgcgtccacgcaattgacgttctaaacgagttcatcccaattttagtcatattcgcaatatcttccgaatataggcggtaagtatcacacgccgaatctgggccctgatcttttttaaatttttcaggtgccatttgataccattggtcccaagttgatgctgacttaccatagcttaacgcataaccttcagattggggtgctgacgttgccgccccccacataaaattagctggaaacttaatcattatcttcttcctctcaattgtcatcgtaaacgttttcaacttatttattgtaccatgcttctttcacggattcgataaccttttaattgggtacgattaaaaggtgtttcaagcaataaattgataaactgaataacgaatgttataaaatacttttttttaaatttttttcgttaataatgactaaatagccttttattctgatttattttatgatatctttttaaaggaatgattaatactcccccaagttaagatcatttcgatactcgaaagtgaccgaaattcttttccaatttaaagaattttggtcactttttttgtacaaaaaaagacgtcgattaaagacgtctttctgaattgattgtttaagcaaaaatcatttggtaaataccagcaccacagattgccccaagaattggcgcaacgactggtacccaagcatatgaccattgtgaatcgcccttatttttaagtggcgtcaacatatggataatccgtgggcctagatcacgcgctggattcaaggcaggaccagttgggccacctaatgaagccaccaacgtcataaccaatagaccaacaacgatatgaccggctgccccaaacttgccagcaccgattgccaatgcaccgaagaccaaaatcaatgttccgataaattcattaacgaaaccattcatacggctatgcgcagcatcgattgtgacaaatgatcccaagataccttcttggttggttgtccgatcgtagtaaggtttgtaggctgcgattaagatcaattgacccaccatagcgcctaagaattgaacaataatgtatggtaaaacatcaccccatgggaataagcccattactgcaaaacttaaagtcactgctgggttaatatggttacctgaaatgccgccgaacataattgctggaatcatgacaccacaaccatatccaaatgcaattaagaaccaatcactactaaacccttttgttcctttcaattcgacgttggcgactgccccgttaccgaaaatgatcataatagctgtaccaataaattcagcagccaaacgtgttgtcaaagaagcatccacttgtatttcctcctaatattatgataagtgtattttatcatgatacgtgataaattttagaaaaacaattaaatttacaagtttcatctattatatgataatgttagcgttttattccatcgaatcctaatcaaattctaaaatttagcttgctaatcttagtcaacatgggataatattcttgattgattacctaaactatctatctcaatttctcggaggtcgctacatgaacttagcactgaccattattttttatatcggcttaaccgttaccgctatcggattattgctactcattattttagcgtgtttcaaaaagaaactaaaaggctctttaattgtcattctgattggcctattattagcggctgcaccagttggcggccatttctatttaactcaaaaagcacaacaaacggcggatcgacgcattgctaaaaaagaacaacgttttaatcatcatgaacaacaactcattaaacatctcaagaaatcaactgtcgcaaccgaatacgtcgctaaaaaatatagcactgtttggcaaaccttaatctcggacggttcagtcgtcatcggtgacggttcctacggtgattacgaagccgcacttgcagctgaaggtcagattctcctatctaaaggcaaactcgatatcgctgatgatcaatatatcaacgcccaaagtgattatcaaaaaatgaaacaaaacgtcactactaaaaataaaacggaattaaccctcgctaaaaaagcccttgaaaaaacgaatcactttacaaccgtcgtgacccgaccaaccggtacctatcaaaactatacggatcggattttcaaagccaatcaacgccatattaaggcaattgaaaagcttaaatatacctatactaaaaccaaataatcctgattatcggtatgaatcaaatcataaatgcggtacaatcaaatgagaagcttaagggctttttatttttaattaaatagttaaccctattatcgattgaggagtgagtaacgtgcgtcgtctatcaaccattttaatgtgttttgcaacatttttattgttaacggcttgtgggaagtcggtatccgccaaattacaacctaataatggtgactttaacgctgtcgtcactggtaagtccaaagctaaaaaagtctattggcaagttgacgataccatccacagcgtcaaaacgaccaatgagactttcaccattaaagtgccctatcaagtgaaagccaatcggatgaccttatcggatcaagctgatttaacgaacccaacttatcttgacggtccgaaaaccacgagtctaatttcgtggttcaacttcattgcccaatacaatccactcgcacaaaaacaagggatcggcgtctttgataccacgcccgtcatcggtatccgtacagaccaagttgatgaacaaactgcgattgcgatgaatgttagtgacagtcagattctcggtatttcaattaaagcactggatgcgactaagaatcccctctttaagaaatacctaactacttttaccactagccttggcactaacactgacaccatcgacaaactcgttactcaagcgattaaaaatcctaatcaacttaaaaagacaactaatcatggcgtgctgtacaccgccattacgatgactggtcaaaaacaatcaatcacacaagtatcaatgagccacgcccaataaaaaaagagcgtccattaagtttaccgacttagtgggcgctctttctatatatatatcagtgttaaaaatttcgggagaaattattcactaaaattagtatactcacttatgattagatagtaaatgataggcatgatgcaaattgatgttgtgtgattcttaaagcccatcaaccatctgcgataacaactatccaccatgcgtcacaacagcattttccgccccggcgtggtatatttaaattagaaaaaggaggtttttattatgttagaatatcacaatattttagttggattagacggttcagaactcgctgaccacgcttttgatcaagccatcgcaatcgccaaacgaaatcaagccaaactttttattgctcagatcattcccgacgatttatacgtcaacgacagtatgaccttccccgcagcgtccattgatgctgaaaagaaatccgtcaaacaatatctcgaacaaaaagtggccttcgcaaaagaacaaggggttgctgaagttcaactgattctcagaacaggctcagcaagacgcgaattagccctcacaatcccagctgaattcaatattgatttaaccatacttgggattagcggtaaaggtgcgattgaacgcttattaatgggttcagtggcccaattcgtgagcatccactccgtcagcaacgtccttttgattaaatcctaatcacttaagaaatcttaaaattaagttgattagtccctattcataacccattgacggtacaattagcttaaatttgttagtttggaagtgtctggcatgtcgtttgatgttactaaattatctgatcaaaatttaaaacgttggtttcaagccaatcgtgagccaattatcgtcacgctacggcatccaacgacatggctcactaaactaaatcagttattgatccacttttttgaataatcgattcccatagaatacccgctagtcgtttgatattgacgctagcgggtattctatttttactaactttgatgctataataacctatctttagtctttcgaaggggggggttatgatgacgcaacatactaaacgattactaatcgtattaggctgtctaatgatgattggattaggttacctactctacttagattttcaaccagatttaatccagctattaaatcatccgaccaatcaacgacaatttttagtgaccgccattcgatcacatggtttaaaggacgcttatttgctgattctattgattattttactctcagcaattcctggtctcccagtatcgctaatctgcatcccagttggtatttgttacggtccttatttgggaaccctgattaatacgctcggaattgttttcggtaatttattagtcatcggcctcctcaaaaaaactgaacagcaccatccgactaaaacaaaccgcgtcctaaccgatattcggcgtatgcaccaccctttattgggcattgtgcttggttacatggtccccatcattcccgcttttttagtcaatctgaccgtcgttcggttaaacgtgactttaaccgctttgatgattgcggtctgcattggcaccctgccaaccgcgttactctattcattaggtggcgatgcacttttaaaaggaaactatcaccagatactcgtcattggtttgatcctgctggcattattactactcattaaattgattaaaaaggaacggcatatttttgattatcttcaatataagtaactaataacctccaattccaccaagggtagtcatctccatccgtaccatcttgtaatcgttaaggcccagtagtactattttagtatcaagtacttttgggggattaccatgcaaaaaacaatttatggattcagcttgctactcgcaagtagtttattattagccgcttgtacaaatcaaaccgctaaggatgctgcaattagtagcagccaacaccaagctagtcagcaaaaacaaaattcattgtcagcttctagcaaaaaagaagccctagatagtcaatcgactagtatcaaaatcgcagacgcttcactggcggctgctaaatcagccaatcggcaaacgactgaatcaagtcagcggacttctcaaccaaccgaaacaacgacaacggttaaattaaccgacagtcaaaaaacgagtgtcaccaaagcttttctaacttgggcagaaggacaagctaaaattggcaatatggcagtaagtgattggtatttcgatcatggtgcagcagggcgtggtgattggttcgcagattcgcattcgccagacggtcgtattttagtgcaatctcaagttgcgcaaagtgatgctaacgatgcccagtatccaatccacgcaattggtggctgtgtcttttacacggccaaagatggcaccgttggtcacggtaatctgtatcaaggtgattttgcaagtaattatagtatcgacatggatatgagtcggcccgtcagtaaatatttattaggcgataacggcaaagtttatgaattaaaaaccggtaacggtcaggctgtttcgaccaacactggttttggtgaagtagctgatgacggtcaaagcgatgagattcaagccgttccattttccgtctcacaagatcaaggcgctcaaagtgaattaaaaacattgttggcccaatactaattaataaggagtctcacgatgaatcagtacccctacacatttacgagtacgattaccgcagccacaatcggcaaaggcggtgcctatgtcgtctttccttatgatattcggacagaattccagcaagggcgcgtcaaagttcacgctatttttgacgaaaagatcccctatgacggcagcatcgttaatatgggcttaactaatcctgacggctcaatttgttatattcttggtgttcgcaaggatgtccgcacccaactcaataaaacaattggtgatgtcgtgacggtgacagtcacacaacgttgacggctatgcttattaagcgctagcctattgtaatcgctttcatatggcgttatccttagtttagtatctaattctattaaggagatgtttttaatggatcgtttacaaaataaggttgctattattactggtggtattaaaggaattggtttagccactgcacaagcctttgttgctgaaggtgcacaagtcgtaattaccgatattgatggcacgaatcaccaaacagtcttagaagcattgtccccttcagcacattttattgaacataacgttgctgatgaacaaacttgggagacggtctttacaaaaacaatcgaactttttggccatgttgatatcgtcgtcaacaatgctggtattcttgattttaacgatgctgaacatattaccgatgatatttggcacaaggttctagcagtcgatttagatggcgttatgtacggcgttaaacacggtattgcgcatatgaaaaagaacggtggttcaatcattaacctctcttcgattgcgggactaattgggattccaaacttatttgcgtataatgccgctaagggtggcgttaaaatgttgacgaaatcggctgcgttatattgtgctgaaaatcaatatcaaatccggattaattctattcatcccggttatgtccatacaccaatggttgatgcttatcctgaaatgcgtgctgatcttgaaaagttacatcctttaggtcgacttgctgaagcctccgaaattgctcaaatggcagtctatctcgcttccgatgaatccaaatttgtgacgggtagtgaattagtgattgatggcggttacactgctcagtaataaattaacatgcgctcaaagaaacgtgcctacttttagtggcgcgtttttttaattgttaagcgtattttaaattagcggttactttggtctttttaccgataaaagccagataaccaccgtatttcagcgcataattatgctatacttagttaataaattttgcagctattcctaaaggaggacaatgcaatgactaaacaagaattattagactatctcgaacaaaactcaggggccctcacctcttttagagcaaaaagtttagattatcaaaatatgaaaaatcaaaaacgccaacccgcgaaacgttggaacgaaactaaggtcgaccgggccgttgataaaatggttaaggaatttattgaaagtattcatcaaaagatgacctttaacgttaaaagtgattcctacgatgcttggttacaatttatggaacaaaatgaagtccttgaaggcttagaagaatctgtcaacgaaatggagttcgtctaaactttaaccgaggcaaaataaacattaagttcccctgttgattcttattttgttcgtttagatgattggagtctcattaatatgccaaaaacacttaaacgattcactttttcactattttttattttagtgctcagtcttttattagtcgctatcccggcacaacatagtcaagccgcctttaattttaactggtttacgcataaagcctataaaccggctaagaaaaaggcccctaaacgaaagatgctcgatatcacaccaatctctcaattcccagaattaccaactggttgtgaaattaccgcagtcgctatgttgatggattataaaggcgttgatttatcaaaaacggatatcgccgatgagattccctactcgccagacggtgatatggaaaccggcttttggggcaatccttacgacgattcgggttacaccatgtatccacccgcttgggctgatttatttaaccaataccttggtagcttcaccgatttatctggcgcgtccttaactaaattacgtgcaacgcttaaggataataagccgattgtggcttggattaattatcacggtcaacccgcacattccgttttattgattggttataatcaggataccttgacgtttaatgatccttacacggggaaacggaagacgatgactgctgaaaaattctggaaaattgctagttaccaagggcaccgagcaatgacctattagatcaaacttgacccccgtattaaaaattgctaaactaaccttaatcgaataaataaccgtcaccgggcggtcaggtattgccaaatctcattaggtcattgaagagatttagcggtacctttttttattttaaggaggttatttcgatgacatggttttatttattactagcaggactattagaggtggtttggtcttcaacgatgaaactcagcgaaggctttacccgtttgagttacagtcttgagacgattgtcgcaatgattttcagttccgtctttctttcactcgcattacgccacttaccactcagtatcgcctatccactctggacgggcatcggggcagtcggcgccattttagtcggggtcatcttttttaaagatcagttatctccgatgacttggttctttgtggccctactgattatcgggattattgggattaaaatgaccagctcccactgagtgctgactcagccgattagcttctgagtatagcctagaattgtgagttatgactgagtttagtcataatttgcgattcgtagctagacggaagaagttggctgagaagcacgttatcgattgcctatcaagttgaaaaagctgattatcccgaactatcaggataaccagcttttttgatttgaacggagattgatgagttctgacgcgcgtcaatgcagtatgttcgtttaatatcaggatactatgactgatatcgcacccgcttttttagactgttttaacgtccaattactaatcgccgcgtataaacggcttggcctgaatgcatcaccgcatcatcaataattgagactaatcgcgcttgccgcgttacagctggtgtccaactgtcatcaatcacatcagctagcgttgtttcatcaaccgtcattaaataatcattggtcaattgaacagccgccgctaaatagtcaattaacaattgtttgtcgtccacgacgactttcaccgcttcttccggcgtgtgacaccaatcttgcgtatcatctggcaaaacgagcccaaaacgttgattccaacccgcactttgccataacggtgcaacgtttttcaaatctgagatttgataatccatttcccgcgcagtatgccaagttaaccacgtcactgatttaatcaacggttgcggcattgtattcgcttcgtccaccgtcatttgcgttaatgtgtccagtaaccgttcttcagcccgggccagtgtttcgattgatagttgtgtcattttcatttctaccccaccttttctaaactttaattactgttagcgtaacaaaaaagggtgaattcgtaaatgaattcaccctcaattatcagctagttatgccgacgtctccgataaaagacaatcgccgtactacccactaataaactacctatcaggactaataaaacggattgaccgctattttcgccggttctaggcaatttggtcttagtgtcggttgctttatgctgattaacagctggttgactcggtttaacagccgctttttcaacaatgaccaacccttggatggcttgattgagttgtccataggccgcatcaatttgcgcttgcgtggcatccggattggctaaaattacttttgcttgtcctaatgccgatttaactgcactaaaacttgcatcagtataacgattattttgtaattggtcagcatagttaaccaacgccgttaattctgccgtatcgacttttgttttaattgcaacttgttttaaaccttgcaccgcaacttttaaatcggtggttgcttgatcaacttgaacttgactagcgtctaaattagccaatacttgttcagccgccgttaatttagtagcaagttgtgctgccgtctcacttgtaaaagtataaccttctttaggtgcaactttcttcgcgacagtaatttcagcttgtaaggcaaccggattaacttgaaccaaaccatctaatgccgtctcaagagttttaatcgctgcatcaacttcatcttgcgttgcttggtcgttcgccaatacagtctgagccttcgttaattcagtttgtaattgtttttcactgcttgttgtaaaatgttgatcagtctcaggtttaaccgctttggccttttcaatcaacgtttgcaattctaatttatctgttttaattaagaaatctgtcacttcttgataataagtcgcccgatcgtaagccatcgagaaaccatgagtcgcatccgggataaccacttttttcttcaacaatgatgatgacgcatcgtataacgtatcaaccattctagttggtacaaacgtatcgttaccgccgtggataaataaagttggtagggttgttttctgaacctgattgacggtcgacacgtcagcaattgacataccggcggtttgaactagcttatcattcgctattttaagcgccacttgcattcgttctgtcccctgtatttcttcgagtgtctcatcgtcatcaaacatcccaaatggtctaagttcagttaacaaataatcaatctcatcgctcaatgacgtataaccagcatcttccacaattgctttaacgttatccggtaattgttcgccaccagtcatcatgaccgtggcagcccccatactaacgccttgcaatacaatatccgtctcctgaccggttgtctcaatcatttgttgaatccaaccttggtaatcttgtttctctttccaaccaaaagtgatggttttcccttcactagcaccatgggcccgcgcatctggtgctaagacgttgtagcccatatcataatacattttagcccaaaaagccgcgtctttactagtcccgcgataaccatgtgcgacaatcaccgtttttttagaattgccattctgcaaatatctagcagacagggttaatccatcctctgattgtcgcgtaataatttgagtatcgggattatcatcgtaccattggtgatcagcttgcattgcctcataatcaggcgcatctgtcagatcatcgctgcgaaaactattggctgatgaaatactaaaagaatctcgaacaaagagtactttatacagttcgttaccgaaatcttcaactggtacactattatcaattaaattgccaagattgatatcaccaagatcaagccgactattgccattggctaacttgccagacttaattacttgttgaatttctgtactggttgcagcctggaccgatttaggtgccgtccctaagctaacccccattaacaaaatagcgatacccattccccaatgatactttttcatacaaatccctcattccttttatttgatatgaacaaacgcattgtaccaattaaaagaaaacggttacatagccaaaaccggtttaaatttacccaaaataaagtttatccgaatgacaactaattgagtgcaatttagctcaaaaaaagacagttatttaaactgtctttggaatttattaatcatttaatttaccgaaccaataacatattcgccttcgcgtgaacactggtgtacatcgcgattgaccctaaaaacgcgcgctcgattgcaccgcgaccagtcgcacctaagataattaaatcagtctccaattcttgtggtaacgtcaccgctaacgccttttttggtgaaccgaaacgcacaatcgtctggacgtcggccaacccctgggtcttagcgtatgcagcatcgcttgcgagcagtttttcagctgccgctttttgacgtggttttagtgaatcttcaccaccgtaattagaacccattaaatattctttaggaataatcatcgcaattgataacgctgcctgatttcttttcgtgagttcaaccgcttctttgattgccctgtgtgcattttcagagccatcatccccaactaaaattcgtttatattcgtttgtcatgatagcgcctccttatacgatcatcatacgctcttctgtcaaaaagagggccgattatcacttataaaaaccacctatcatcaactagagatgcagcaagatggtcggccttggaccaccgagcaagatgcactcgcttttatgagcgacgccgggcttgttagtcgtttgaccatggatcaggttggttcttggccccaatccaaatcagaatttaccttggattataaaattgctgaatcaatctggtggctcctctcaatcgcggattcgactaacattgatatcgaaaaagctttagaaaaatccttagtctcacgagaagaacattttaattaatatgcattcaaacgacaaataattctaatattgatgtctttattaaacattaagattgaagctgtctgaaacttatttactttcaagttagatagtaataaaattatatttatcacaaattgaattataaatactgcctctccactctggtgagttcagtcatgttcgat
